United States Patent Application Publication US 2019/0112380 A1 - sequence listing, part 2

SEQ ID NO: 1616 - DNA, 2175 bp, Artificial Sequence
  Synthetic Polynucleotides
atggccttaccagtgaccgccttgctcctgccgctggccttgctgctccacgccgccaggccggacgtcgtgatgacccagacccctctgagcctgcctgtgtccctgggcgatcaggccagcatcagctgtagaagcagccagagcctggtgcacagcaacggcaacacctacctgcactggtatctccagaagcccggccagagccccaagctgctgatctacaaggtgtccaacagattcagcggcgtgcccgacagattctccggcagcggctctggcaccgacttcaccctgaagatcagccgggtggaagccgaggacctgggcgtgtacttctgtagccagaacacccccgtgccccccaagtttggcagcggcaccaagctggaaatcaagggcggaggcggaagtggaggcggaggatctggcggcggaggctctcaggtgcagctccagcagtctggcgctgaactcgtgcggcctggcgcttctgtgaagctgtcttgcaaggccagcggctacaccttcaacgactacgagatgcactgggtcaagcagacccctgtgcacggcctgaagtggatcggagccctggaacccaagaccggcgataccgcctacagccagaagttcaagggcaaggccaccctgaccgccgacaagagcagcagcacagcctacatggaactgcggagcctgaccagcgaggacagcgccgtgtactactgcaccagctgctactactacacctacagcggccagggcaccctcgtgacagtgtctgctacgcgtgagcagaaactgatctcggaagaggatctggcgaagcccaccacgacgccagcgccgcgaccaccaacaccggcgcccaccatcgcgtcgcagcccctgtccctgcgcccagaggcgtgccggccagcggcggggggcgcagtgcacacgagggggctggacttcgcctgtgacatctacatctgggcgcccttggccgggacttgtggggtccttctcctgtcactggttatcaccctttactgcaaacggggcagaaagaaactcctgtatatattcaaacaaccatttatgagaccagtacaaactactcaagaggaagatggctgtagctgccgatttccagaagaagaagaaggaggatgtgaactgagagtgaagttcagcaggagcgcagacgcccccgcgtaccagcagggccagaaccagctctataacgagctgaatctaggacgaagagaggagtacgatgttttggacaagagacgtggccgggaccctgagatggggggaaagccgagaaggaagaaccctcaggaaggcctgtacaatgaactgcagaaagataagatggcggaggcctacagtgagattgggatgaaaggcgagcgccggaggggcaaggggcacgatggcctttaccagggtctcagtacagccaccaaggacacctacgacgcccttcacatgcaggccctgccccctcgctctagtggctccggcgagggcagaggaagtctactaacctgcggagatgtggaagaaaatcctggcccacatatgaccgagtacaagcccacggtgcgcctcgccacccgcgacgacgtccccagggccgtacgcaccctcgccgccgcgttcgccgactaccccgccacgcgccacaccgtcgatccggaccgccacatcgagcgggtcaccgagctgcaagaactcttcctcacgcgcgtcgggctcgacatcggcaaggtgtgggtcgcggacgacggcgccgcggtggcggtctggaccacgccggagagcgtcgaagcgggggcggtgttcgccgagatcggcccgcgcatggccgagttgagcggttcccggctggccgcgcagcaacagatggaaggcctcctggcgccgcaccggcccaaggagcccgcgtggttcctggccaccgtcggcgtctcgcccgaccaccagggcaagggtctgggcagcgccgtcgtgctccccggagtggaggcggccgagcgcgccggggtgcccgccttcctggagacctccgcgccccgcaacctccccttctacgagcggctcggcttcaccgtcaccgccgacgtcgaggtgcccgaaggaccgcgcacctggtgcatgacccgcaagcccggtgcctga

SEQ ID NO: 1617 - DNA, 2172 bp, Artificial Sequence
  Synthetic Polynucleotides
atggccttaccagtgaccgccttgctcctgccgctggccttgctgctccacgccgccaggccggacatccaactgacccagagccccagcagcctgtctgcctctgtgggcgacagagtgaccatcacctgtagagccagccagggcatcagaaacgacctgggctggtatcagcagaagcccggcaaggcccccaagcggctgatctatgctgccagctccctccagaatggcgtgcccagcagattttccggcagcggctctggcaccgagttcaccctgaccatcagctccctccagcccgaggacttcgccacctactactgcctccagcacaacacctaccccgccttcggccagggcaccaaggtggaaatcaagagaggcggaggcggaagtggaggcggaggatctggcggcggaggctctcaggtgcaactccaggaatctggccctggcctcgtgaagcctagccagaccctgagcctgacctgtaccgtgtctggcggcagcatcagcagcttcaactactactggtcctggatcagacaccaccctggcaagggcctggaatggatcggctacatctactacagcggcagcacctacagcaaccccagcctgaagtcccgcgtgaccatctccgtggacaccagcaagaaccagtttagcctgaccctgtccagcgtgacagccgccgataccgccgtgtactactgcgccagaggctacaactggaactacttcgactactggggccagggaaccctcgtgaccgtgtctagtacgcgtgagcagaaactgatctcggaagaggatctggcgaagcccaccacgacgccagcgccgcgaccaccaacaccggcgcccaccatcgcgtcgcagcccctgtccctgcgcccagaggcgtgccggccagcggcggggggcgcagtgcacacgagggggctggacttcgcctgtgacatctacatctgggcgcccttggccgggacttgtggggtccttctcctgtcactggttatcaccctttactgcaaacggggcagaaagaaactcctgtatatattcaaacaaccatttatgagaccagtacaaactactcaagaggaagatggctgtagctgccgatttccagaagaagaagaaggaggatgtgaactgagagtgaagttcagcaggagcgcagacgcccccgcgtaccagcagggccagaaccagctctataacgagctgaatctaggacgaagagaggagtacgatgttttggacaagagacgtggccgggaccctgagatggggggaaagccgagaaggaagaaccctcaggaaggcctgtacaatgaactgcagaaagataagatggcggaggcctacagtgagattgggatgaaaggcgagcgccggaggggcaaggggcacgatggcctttaccagggtctcagtacagccaccaaggacacctacgacgcccttcacatgcaggccctgccccctcgctctagtggctccggcgagggcagaggaagtctactaacctgcggagatgtggaagaaaatcctggcccacatatgaccgagtacaagcccacggtgcgcctcgccacccgcgacgacgtccccagggccgtacgcaccctcgccgccgcgttcgccgactaccccgccacgcgccacaccgtcgatccggaccgccacatcgagcgggtcaccgagctgcaagaactcttcctcacgcgcgtcgggctcgacatcggcaaggtgtgggtcgcggacgacggcgccgcggtggcggtctggaccacgccggagagcgtcgaagcgggggcggtgttcgccgagatcggcccgcgcatggccgagttgagcggttcccggctggccgcgcagcaacagatggaaggcctcctggcgccgcaccggcccaaggagcccgcgtggttcctggccaccgtcggcgtctcgcccgaccaccagggcaagggtctgggcagcgccgtcgtgctccccggagtggaggcggccgagcgcgccggggtgcccgccttcctggagacctccgcgccccgcaacctccccttctacgagcggctcggcttcaccgtcaccgccgacgtcgaggtgcccgaaggaccgcgcacctggtgcatgacccgcaagcccggtgcctga

SEQ ID NO: 1618 - DNA, 2178 bp, Artificial Sequence
  Synthetic Polynucleotides
atggccttaccagtgaccgccttgctcctgccgctggccttgctgctccacgccgccaggccggacgacatcgtgctgacccagagccccgccagcctggccgtgagcctgggccagagcgtgaccatcagctgcagagccagcgagagcgtggagtactacggcaccagcctgatgcagtggtaccagcagaagcccggccagccccccaagctgctgatctacgccaccagcaacgtggagagcggcgtgcccgccagattcagcggcagcggcagcggcaccgacttcagcctgaacatccaccccgtggaggaggacgacatcgccatgtacttctgccagcagagcagaaagctgcccagcaccttcggcggcggcaccaagctggagatcaagggcggaggcggaagtggaggcggaggatctggcggcggaggctctgacgtgagactgcaggagagcggccccggccaggtgaagcccagccagaccgtgagcctgacctgcagcgtgaccggctacagcatcaccaacggcaaccactggtggaactggatcagacaggtgagcggcagcaagctggagtggatcggctacatcagcagcagcggcagcaccgacagcaaccccagcctgaagagcagaatcagcatcaccagagacaccagcaagaaccagctgttcctgcagctgaacagcgtgaccaccgaggacatcgccacctactactgcgccagaggctactacttcgactactggggccagggcaccaccctgaccgtgagcagcacgcgtgagcagaaactgatctcggaagaggatctggcgaagcccaccacgacgccagcgccgcgaccaccaacaccggcgcccaccatcgcgtcgcagcccctgtccctgcgcccagaggcgtgccggccagcggcggggggcgcagtgcacacgagggggctggacttcgcctgtgacatctacatctgggcgcccttggccgggacttgtggggtccttctcctgtcactggttatcaccctttactgcaaacggggcagaaagaaactcctgtatatattcaaacaaccatttatgagaccagtacaaactactcaagaggaagatggctgtagctgccgatttccagaagaagaagaaggaggatgtgaactgagagtgaagttcagcaggagcgcagacgcccccgcgtaccagcagggccagaaccagctctataacgagctgaatctaggacgaagagaggagtacgatgttttggacaagagacgtggccgggaccctgagatggggggaaagccgagaaggaagaaccctcaggaaggcctgtacaatgaactgcagaaagataagatggcggaggcctacagtgagattgggatgaaaggcgagcgccggaggggcaaggggcacgatggcctttaccagggtctcagtacagccaccaaggacacctacgacgcccttcacatgcaggccctgccccctcgctctagtggctccggcgagggcagaggaagtctactaacctgcggagatgtggaagaaaatcctggcccacatatgaccgagtacaagcccacggtgcgcctcgccacccgcgacgacgtccccagggccgtacgcaccctcgccgccgcgttcgccgactaccccgccacgcgccacaccgtcgatccggaccgccacatcgagcgggtcaccgagctgcaagaactcttcctcacgcgcgtcgggctcgacatcggcaaggtgtgggtcgcggacgacggcgccgcggtggcggtctggaccacgccggagagcgtcgaagcgggggcggtgttcgccgagatcggcccgcgcatggccgagttgagcggttcccggctggccgcgcagcaacagatggaaggcctcctggcgccgcaccggcccaaggagcccgcgtggttcctggccaccgtcggcgtctcgcccgaccaccagggcaagggtctgggcagcgccgtcgtgctccccggagtggaggcggccgagcgcgccggggtgcccgccttcctggagacctccgcgccccgcaacctccccttctacgagcggctcggcttcaccgtcaccgccgacgtcgaggtgcccgaaggaccgcgcacctggtgcatgacccgcaagcccggtgcctga

SEQ ID NO: 1619 - DNA, 1812 bp, Artificial Sequence
  Synthetic Polynucleotides
atggccctgcccgtgacagccctgctgctgcctctggctctgctgctgcacgccgccagacccgatgaattcgaggtgcaactggtggaaagcggcggaggcctggtgcaggctggcggatctctgagactgagctgtgccgccagcggcatcaccttcagcatcaacacaatgggctggtacagacaggcccctggcaagcagagggaactggtggccctgatctccagcatcggcgacacctactacgccgacagcgtgaagggccggttcaccatcagccgggacaacgccaagaacaccgtgtacctccagatgaacagcctgaagcccgaggacaccgccgtgtactactgcaagcggttcagaacagccgcccagggcaccgattattggggccagggaacacaagtgaccgtgtcctctacgcgtgagcagaaactgatctcggaagaggatctggcgaagcccaccacgacgccagcgccgcgaccaccaacaccggcgcccaccatcgcgtcgcagcccctgtccctgcgcccagaggcgtgccggccagcggcggggggcgcagtgcacacgagggggctggacttcgcctgtgacatctacatctgggcgcccttggccgggacttgtggggtccttctcctgtcactggttatcaccctttactgcaaacggggcagaaagaaactcctgtatatattcaaacaaccatttatgagaccagtacaaactactcaagaggaagatggctgtagctgccgatttccagaagaagaagaaggaggatgtgaactgagagtgaagttcagcaggagcgcagacgcccccgcgtaccagcagggccagaaccagctctataacgagctgaatctaggacgaagagaggagtacgatgttttggacaagagacgtggccgggaccctgagatggggggaaagccgagaaggaagaaccctcaggaaggcctgtacaatgaactgcagaaagataagatggcggaggcctacagtgagattgggatgaaaggcgagcgccggaggggcaaggggcacgatggcctttaccagggtctcagtacagccaccaaggacacctacgacgcccttcacatgcaggccctgccccctcgctctagtggctccggcgagggcagaggaagtctactaacctgcggagatgtggaagaaaatcctggcccacatatgaccgagtacaagcccacggtgcgcctcgccacccgcgacgacgtccccagggccgtacgcaccctcgccgccgcgttcgccgactaccccgccacgcgccacaccgtcgatccggaccgccacatcgagcgggtcaccgagctgcaagaactcttcctcacgcgcgtcgggctcgacatcggcaaggtgtgggtcgcggacgacggcgccgcggtggcggtctggaccacgccggagagcgtcgaagcgggggcggtgttcgccgagatcggcccgcgcatggccgagttgagcggttcccggctggccgcgcagcaacagatggaaggcctcctggcgccgcaccggcccaaggagcccgcgtggttcctggccaccgtcggcgtctcgcccgaccaccagggcaagggtctgggcagcgccgtcgtgctccccggagtggaggcggccgagcgcgccggggtgcccgccttcctggagacctccgcgccccgcaacctccccttctacgagcggctcggcttcaccgtcaccgccgacgtcgaggtgcccgaaggaccgcgcacctggtgcatgacccgcaagcccggtgcctga

SEQ ID NO: 1620 - DNA, 1617 bp, Artificial Sequence
  Synthetic Polynucleotides
atggactggatttggcgcatccttttccttgtcggcgctgctaccggcgcccattccttcgaaggcagcggattcgaatacgccaaagagatgcggaacgcctactgggagatcgccctgctgcccaatctgaccaaccagcagaagagagcccccatcagaaagctgtacgacgacccctcccagagcagcgagctgctgtctgaggctaaaaaactgaacgatagccagacgcgtgagcagaaactgatctcggaagaggatctggcgaagcccaccacgacgccagcgccgcgaccaccaacaccggcgcccaccatcgcgtcgcagcccctgtccctgcgcccagaggcgtgccggccagcggcggggggcgcagtgcacacgagggggctggacttcgcctgtgacatctacatctgggcgcccttggccgggacttgtggggtccttctcctgtcactggttatcaccctttactgcaaacggggcagaaagaaactcctgtatatattcaaacaaccatttatgagaccagtacaaactactcaagaggaagatggctgtagctgccgatttccagaagaagaagaaggaggatgtgaactgagagtgaagttcagcaggagcgcagacgcccccgcgtaccagcagggccagaaccagctctataacgagctgaatctaggacgaagagaggagtacgatgttttggacaagagacgtggccgggaccctgagatggggggaaagccgagaaggaagaaccctcaggaaggcctgtacaatgaactgcagaaagataagatggcggaggcctacagtgagattgggatgaaaggcgagcgccggaggggcaaggggcacgatggcctttaccagggtctcagtacagccaccaaggacacctacgacgcccttcacatgcaggccctgccccctcgctctagtggctccggcgagggcagaggaagtctactaacctgcggagatgtggaagaaaatcctggcccacatatgaccgagtacaagcccacggtgcgcctcgccacccgcgacgacgtccccagggccgtacgcaccctcgccgccgcgttcgccgactaccccgccacgcgccacaccgtcgatccggaccgccacatcgagcgggtcaccgagctgcaagaactcttcctcacgcgcgtcgggctcgacatcggcaaggtgtgggtcgcggacgacggcgccgcggtggcggtctggaccacgccggagagcgtcgaagcgggggcggtgttcgccgagatcggcccgcgcatggccgagttgagcggttcccggctggccgcgcagcaacagatggaaggcctcctggcgccgcaccggcccaaggagcccgcgtggttcctggccaccgtcggcgtctcgcccgaccaccagggcaagggtctgggcagcgccgtcgtgctccccggagtggaggcggccgagcgcgccggggtgcccgccttcctggagacctccgcgccccgcaacctccccttctacgagcggctcggcttcaccgtcaccgccgacgtcgaggtgcccgaaggaccgcgcacctggtgcatgacccgcaagcccggtgcctga

SEQ ID NO: 1621 - DNA, 1830 bp, Artificial Sequence
  Synthetic Polynucleotides
atggccctgcccgtgacagccctgctgctgcctctggctctgctgctgcacgccgccagacccgatgaattcggctctgacctgggcatcaagctgctgttcgccgctgccaagggccaggacgacgaagtgcggattctgctggctgctggggccgacgtgaacgccaaggatttcgagggctacacccccctgcacgtggccgcctatgatggacacctggaaatcgtggaagtgctgctgaaggctggcgctgatgtgaatgccaaagacagccagggccggacccctctgcatgaagccgcctacagcggccatctggaaattgtggaagtgctgctgaaagccggggcagacgtgaacgctcaggacgacgctggcgagacaccagccgatctggctgcagcttggggccacgaagatatcgccgaggtgctgcagaagacgcgtgagcagaaactgatctcggaagaggatctggcgaagcccaccacgacgccagcgccgcgaccaccaacaccggcgcccaccatcgcgtcgcagcccctgtccctgcgcccagaggcgtgccggccagcggcggggggcgcagtgcacacgagggggctggacttcgcctgtgacatctacatctgggcgcccttggccgggacttgtggggtccttctcctgtcactggttatcaccctttactgcaaacggggcagaaagaaactcctgtatatattcaaacaaccatttatgagaccagtacaaactactcaagaggaagatggctgtagctgccgatttccagaagaagaagaaggaggatgtgaactgagagtgaagttcagcaggagcgcagacgcccccgcgtaccagcagggccagaaccagctctataacgagctgaatctaggacgaagagaggagtacgatgttttggacaagagacgtggccgggaccctgagatggggggaaagccgagaaggaagaaccctcaggaaggcctgtacaatgaactgcagaaagataagatggcggaggcctacagtgagattgggatgaaaggcgagcgccggaggggcaaggggcacgatggcctttaccagggtctcagtacagccaccaaggacacctacgacgcccttcacatgcaggccctgccccctcgctctagtggctccggcgagggcagaggaagtctactaacctgcggagatgtggaagaaaatcctggcccacatatgaccgagtacaagcccacggtgcgcctcgccacccgcgacgacgtccccagggccgtacgcaccctcgccgccgcgttcgccgactaccccgccacgcgccacaccgtcgatccggaccgccacatcgagcgggtcaccgagctgcaagaactcttcctcacgcgcgtcgggctcgacatcggcaaggtgtgggtcgcggacgacggcgccgcggtggcggtctggaccacgccggagagcgtcgaagcgggggcggtgttcgccgagatcggcccgcgcatggccgagttgagcggttcccggctggccgcgcagcaacagatggaaggcctcctggcgccgcaccggcccaaggagcccgcgtggttcctggccaccgtcggcgtctcgcccgaccaccagggcaagggtctgggcagcgccgtcgtgctccccggagtggaggcggccgagcgcgccggggtgcccgccttcctggagacctccgcgccccgcaacctccccttctacgagcggctcggcttcaccgtcaccgccgacgtcgaggtgcccgaaggaccgcgcacctggtgcatgacccgcaagcccggtgcctga

SEQ ID NO: 1622 - DNA, 1827 bp, Artificial Sequence
  Synthetic Polynucleotides
atggactggatttggcgcatccttttccttgtcggcgctgctaccggcgcccattccttcgaaagaagcgatctgggaaagaagctgctggaagctgccagagccggacaggatgatgaagtgcgcatcctgatggcaaacggcgcagatgtgaacgcaaaggacgagtacggcctgacccccctgtacctggctacagcccacgggcacctggaaattgtggaagtgctgctgaagaacggcgctgacgtgaacgccgtggacgccatcggctttaccccactgcatctggccgctttcatcgggcatctcgaaatcgcagaggtgctgctgaaacacggggccgatgtgaatgcccaggacaagttcggcaagaccgccttcgacatcagcatcggcaacggcaacgaggacctggccgagatcctgcagaaactgaacacgcgtgagcagaaactgatctcggaagaggatctggcgaagcccaccacgacgccagcgccgcgaccaccaacaccggcgcccaccatcgcgtcgcagcccctgtccctgcgcccagaggcgtgccggccagcggcggggggcgcagtgcacacgagggggctggacttcgcctgtgacatctacatctgggcgcccttggccgggacttgtggggtccttctcctgtcactggttatcaccctttactgcaaacggggcagaaagaaactcctgtatatattcaaacaaccatttatgagaccagtacaaactactcaagaggaagatggctgtagctgccgatttccagaagaagaagaaggaggatgtgaactgagagtgaagttcagcaggagcgcagacgcccccgcgtaccagcagggccagaaccagctctataacgagctgaatctaggacgaagagaggagtacgatgttttggacaagagacgtggccgggaccctgagatggggggaaagccgagaaggaagaaccctcaggaaggcctgtacaatgaactgcagaaagataagatggcggaggcctacagtgagattgggatgaaaggcgagcgccggaggggcaaggggcacgatggcctttaccagggtctcagtacagccaccaaggacacctacgacgcccttcacatgcaggccctgccccctcgctctagtggctccggcgagggcagaggaagtctactaacctgcggagatgtggaagaaaatcctggcccacatatgaccgagtacaagcccacggtgcgcctcgccacccgcgacgacgtccccagggccgtacgcaccctcgccgccgcgttcgccgactaccccgccacgcgccacaccgtcgatccggaccgccacatcgagcgggtcaccgagctgcaagaactcttcctcacgcgcgtcgggctcgacatcggcaaggtgtgggtcgcggacgacggcgccgcggtggcggtctggaccacgccggagagcgtcgaagcgggggcggtgttcgccgagatcggcccgcgcatggccgagttgagcggttcccggctggccgcgcagcaacagatggaaggcctcctggcgccgcaccggcccaaggagcccgcgtggttcctggccaccgtcggcgtctcgcccgaccaccagggcaagggtctgggcagcgccgtcgtgctccccggagtggaggcggccgagcgcgccggggtgcccgccttcctggagacctccgcgccccgcaacctccccttctacgagcggctcggcttcaccgtcaccgccgacgtcgaggtgcccgaaggaccgcgcacctggtgcatgacccgcaagcccggtgcctga

SEQ ID NO: 1623 - DNA, 2283 bp, Artificial Sequence
  Synthetic Polynucleotides
atggccctgcccgtgacagccctgctgctgcctctggctctgctgctgcacgccgccagacccgatgaattcgaggtgcaactggtggaaagcggcggaggcctggtgcaggctggcggatctctgagactgagctgtgccgccagcggcatcaccttcagcatcaacacaatgggctggtacagacaggcccctggcaagcagagggaactggtggccctgatctccagcatcggcgacacctactacgccgacagcgtgaagggccggttcaccatcagccgggacaacgccaagaacaccgtgtacctccagatgaacagcctgaagcccgaggacaccgccgtgtactactgcaagcggttcagaacagccgcccagggcaccgattattggggccagggaacacaagtgaccgtgtcctctctcgagggaggaggcggctccgggggaggcggaagtggaggcggaggatctgggtctggaggaagcggatctggaggctcagggtcagggggctcaggcagtggaggctctttcgaagtgcaactggtggaatctgggggcggactggtgcagccaggcggaagtctgaggctgtcttgtgccgcctccggcagcatcttcggcttcaacgacatggcctggtatcggcaggctcccggaaaacagcgcgagctggtggctctgattagcagagtgggcgtgaccagcagcgccgactctgtgaagggcagattcacaatctccagagtgaacgccaaggatacagtgtacctccagatgaactctctgaaacctgaggatacagcagtgtactattgctacatggaccagcggctggacggcagcacactggcctactggggacagggaactcaagtgacagtgtctagcacgcgtgagcagaaactgatctcggaagaggatctggcgaagcccaccacgacgccagcgccgcgaccaccaacaccggcgcccaccatcgcgtcgcagcccctgtccctgcgcccagaggcgtgccggccagcggcggggggcgcagtgcacacgagggggctggacttcgcctgtgacatctacatctgggcgcccttggccgggacttgtggggtccttctcctgtcactggttatcaccctttactgcaaacggggcagaaagaaactcctgtatatattcaaacaaccatttatgagaccagtacaaactactcaagaggaagatggctgtagctgccgatttccagaagaagaagaaggaggatgtgaactgagagtgaagttcagcaggagcgcagacgcccccgcgtaccagcagggccagaaccagctctataacgagctgaatctaggacgaagagaggagtacgatgttttggacaagagacgtggccgggaccctgagatggggggaaagccgagaaggaagaaccctcaggaaggcctgtacaatgaactgcagaaagataagatggcggaggcctacagtgagattgggatgaaaggcgagcgccggaggggcaaggggcacgatggcctttaccagggtctcagtacagccaccaaggacacctacgacgcccttcacatgcaggccctgccccctcgctctagtggctccggcgagggcagaggaagtctactaacctgcggagatgtggaagaaaatcctggcccacatatgaccgagtacaagcccacggtgcgcctcgccacccgcgacgacgtccccagggccgtacgcaccctcgccgccgcgttcgccgactaccccgccacgcgccacaccgtcgatccggaccgccacatcgagcgggtcaccgagctgcaagaactcttcctcacgcgcgtcgggctcgacatcggcaaggtgtgggtcgcggacgacggcgccgcggtggcggtctggaccacgccggagagcgtcgaagcgggggcggtgttcgccgagatcggcccgcgcatggccgagttgagcggttcccggctggccgcgcagcaacagatggaaggcctcctggcgccgcaccggcccaaggagcccgcgtggttcctggccaccgtcggcgtctcgcccgaccaccagggcaagggtctgggcagcgccgtcgtgctccccggagtggaggcggccgagcgcgccggggtgcccgccttcctggagacctccgcgccccgcaacctccccttctacgagcggctcggcttcaccgtcaccgccgacgtcgaggtgcccgaaggaccgcgcacctggtgcatgacccgcaagcccggtgcctga

SEQ ID NO: 1624 - DNA, 2175 bp, Artificial Sequence
  Synthetic Polynucleotides
atggccttaccagtgaccgccttgctcctgccgctggccttgctgctccacgccgccaggccggacatccagatgacccagagccccagcagcctgtctgccagcgtgggcgacagagtgaccatcacctgtagagccagccaggacgtgaacaccgccgtggcctggtatcagcagaagcctggcaaggcccccaagctgctgatctacagcgccagcttcctggaaagcggcgtgcccagcagattcagcggaagcagaagcggcaccgacttcaccctgaccatcagctccctccagcccgaggacttcgccacctactactgccagcagcactacaccacccctcccaccttcggccagaccaaggtggaaatcaagagaggcggaggcggaagtggaggcggaggatctggcggcggaggctctgaagtgcaactggtggaatctggcggcggactggtgcagcctggcggatctctgagactgagctgtgccgccagcggcttcaacatcaaggacacctacatccactgggtgcgccaggcccctggaaagggactggaatgggtggcccggatctaccccaccaacggctacaccagatacgccgacagcgtgaagggccggttcaccatcagcgccgacaccagcaagaataccgcctacctccagatgaacagcctgcgggccgaggataccgccgtgtactactgctcaagatggggaggcgacggcttctacgctatggacgtgtggggccagggcacccttgtgaccgtgtcatctacgcgtgagcagaaactgatctcggaagaggatctggcgaagcccaccacgacgccagcgccgcgaccaccaacaccggcgcccaccatcgcgtcgcagcccctgtccctgcgcccagaggcgtgccggccagcggcggggggcgcagtgcacacgagggggctggacttcgcctgtgacatctacatctgggcgcccttggccgggacttgtggggtccttctcctgtcactggttatcaccctttactgcaaacggggcagaaagaaactcctgtatatattcaaacaaccatttatgagaccagtacaaactactcaagaggaagatggctgtagctgccgatttccagaagaagaagaaggaggatgtgaactgagagtgaagttcagcaggagcgcagacgcccccgcgtaccagcagggccagaaccagctctataacgagctgaatctaggacgaagagaggagtacgatgttttggacaagagacgtggccgggaccctgagatggggggaaagccgagaaggaagaaccctcaggaaggcctgtacaatgaactgcagaaagataagatggcggaggcctacagtgagattgggatgaaaggcgagcgccggaggggcaaggggcacgatggcctttaccagggtctcagtacagccaccaaggacacctacgacgcccttcacatgcaggccctgccccctcgctctagtggctccggcgagggcagaggaagtctactaacctgcggagatgtggaagaaaatcctggcccacatatgaccgagtacaagcccacggtgcgcctcgccacccgcgacgacgtccccagggccgtacgcaccctcgccgccgcgttcgccgactaccccgccacgcgccacaccgtcgatccggaccgccacatcgagcgggtcaccgagctgcaagaactcttcctcacgcgcgtcgggctcgacatcggcaaggtgtgggtcgcggacgacggcgccgcggtggcggtctggaccacgccggagagcgtcgaagcgggggcggtgttcgccgagatcggcccgcgcatggccgagttgagcggttcccggctggccgcgcagcaacagatggaaggcctcctggcgccgcaccggcccaaggagcccgcgtggttcctggccaccgtcggcgtctcgcccgaccaccagggcaagggtctgggcagcgccgtcgtgctccccggagtggaggcggccgagcgcgccggggtgcccgccttcctggagacctccgcgccccgcaacctccccttctacgagcggctcggcttcaccgtcaccgccgacgtcgaggtgcccgaaggaccgcgcacctggtgcatgacccgcaagcccggtgcctga

SEQ ID NO: 1625 - DNA, 1812 bp, Artificial Sequence
  Synthetic Polynucleotides
atggccctgcccgtgacagccctgctgctgcctctggctctgctgctgcacgccgccagacccgatgaattcgacgtgcaactcgtggaatccggcggaggcctggtgcagcctggcggatctctgagactgagctgtgccgccagcggctctatcggcggactgaatgccatggcctggtacagacaggcccctggcaaagaacgggaactggtggccggcatctttggcgtgggcagcaccagatacgccgacagcgtgaagggccggttcaccatcagccgggacaacagcaagaacaccgtgtacctgcagatgaacagcctgcggcccgaggataccgccgtgtactactgcagaatgtccagcgtgaccagaggctccagcgactactggggccagggaacacttgtgaccgtgtccagtacgcgtgagcagaaactgatctcggaagaggatctggcgaagcccaccacgacgccagcgccgcgaccaccaacaccggcgcccaccatcgcgtcgcagcccctgtccctgcgcccagaggcgtgccggccagcggcggggggcgcagtgcacacgagggggctggacttcgcctgtgacatctacatctgggcgcccttggccgggacttgtggggtccttctcctgtcactggttatcaccctttactgcaaacggggcagaaagaaactcctgtatatattcaaacaaccatttatgagaccagtacaaactactcaagaggaagatggctgtagctgccgatttccagaagaagaagaaggaggatgtgaactgagagtgaagttcagcaggagcgcagacgcccccgcgtaccagcagggccagaaccagctctataacgagctgaatctaggacgaagagaggagtacgatgttttggacaagagacgtggccgggaccctgagatggggggaaagccgagaaggaagaaccctcaggaaggcctgtacaatgaactgcagaaagataagatggcggaggcctacagtgagattgggatgaaaggcgagcgccggaggggcaaggggcacgatggcctttaccagggtctcagtacagccaccaaggacacctacgacgcccttcacatgcaggccctgccccctcgctctagtggctccggcgagggcagaggaagtctactaacctgcggagatgtggaagaaaatcctggcccacatatgaccgagtacaagcccacggtgcgcctcgccacccgcgacgacgtccccagggccgtacgcaccctcgccgccgcgttcgccgactaccccgccacgcgccacaccgtcgatccggaccgccacatcgagcgggtcaccgagctgcaagaactcttcctcacgcgcgtcgggctcgacatcggcaaggtgtgggtcgcggacgacggcgccgcggtggcggtctggaccacgccggagagcgtcgaagcgggggcggtgttcgccgagatcggcccgcgcatggccgagttgagcggttcccggctggccgcgcagcaacagatggaaggcctcctggcgccgcaccggcccaaggagcccgcgtggttcctggccaccgtcggcgtctcgcccgaccaccagggcaagggtctgggcagcgccgtcgtgctccccggagtggaggcggccgagcgcgccggggtgcccgccttcctggagacctccgcgccccgcaacctccccttctacgagcggctcggcttcaccgtcaccgccgacgtcgaggtgcccgaaggaccgcgcacctggtgcatgacccgcaagcccggtgcctga

SEQ ID NO: 1626 - DNA, 1632 bp, Artificial Sequence
  Synthetic Polynucleotides
atggccctgcccgtgacagccctgctgctgcctctggctctgctgctgcacgccgccagacccgatgaattcgtggacaacaagttcaacaaagagcggtacagcgcctactacgagatttggcaactgcccaacctgaacgtgcggcagaaggccgccttcatcggatctctgcaggacgaccctagccagagcgccaatctgctggccgaggccaagaagctgaacgacgcccaggcccctaaaacgcgtgagcagaaactgatctcggaagaggatctggcgaagcccaccacgacgccagcgccgcgaccaccaacaccggcgcccaccatcgcgtcgcagcccctgtccctgcgcccagaggcgtgccggccagcggcggggggcgcagtgcacacgagggggctggacttcgcctgtgacatctacatctgggcgcccttggccgggacttgtggggtccttctcctgtcactggttatcaccctttactgcaaacggggcagaaagaaactcctgtatatattcaaacaaccatttatgagaccagtacaaactactcaagaggaagatggctgtagctgccgatttccagaagaagaagaaggaggatgtgaactgagagtgaagttcagcaggagcgcagacgcccccgcgtaccagcagggccagaaccagctctataacgagctgaatctaggacgaagagaggagtacgatgttttggacaagagacgtggccgggaccctgagatggggggaaagccgagaaggaagaaccctcaggaaggcctgtacaatgaactgcagaaagataagatggcggaggcctacagtgagattgggatgaaaggcgagcgccggaggggcaaggggcacgatggcctttaccagggtctcagtacagccaccaaggacacctacgacgcccttcacatgcaggccctgccccctcgctctagtggctccggcgagggcagaggaagtctactaacctgcggagatgtggaagaaaatcctggcccacatatgaccgagtacaagcccacggtgcgcctcgccacccgcgacgacgtccccagggccgtacgcaccctcgccgccgcgttcgccgactaccccgccacgcgccacaccgtcgatccggaccgccacatcgagcgggtcaccgagctgcaagaactcttcctcacgcgcgtcgggctcgacatcggcaaggtgtgggtcgcggacgacggcgccgcggtggcggtctggaccacgccggagagcgtcgaagcgggggcggtgttcgccgagatcggcccgcgcatggccgagttgagcggttcccggctggccgcgcagcaacagatggaaggcctcctggcgccgcaccggcccaaggagcccgcgtggttcctggccaccgtcggcgtctcgcccgaccaccagggcaagggtctgggcagcgccgtcgtgctccccggagtggaggcggccgagcgcgccggggtgcccgccttcctggagacctccgcgccccgcaacctccccttctacgagcggctcggcttcaccgtcaccgccgacgtcgaggtgcccgaaggaccgcgcacctggtgcatgacccgcaagcccggtgcctga

SEQ ID NO: 1627 - DNA, 2298 bp, Artificial Sequence
  Synthetic Polynucleotides
atggccctgcccgtgacagccctgctgctgcctctggctctgctgctgcacgccgccagacccgatgaattcgacgtgcaactcgtggaatccggcggaggcctggtgcagcctggcggatctctgagactgagctgtgccgccagcggctctatcggcggactgaatgccatggcctggtacagacaggcccctggcaaagaacgggaactggtggccggcatctttggcgtgggcagcaccagatacgccgacagcgtgaagggccggttcaccatcagccgggacaacagcaagaacaccgtgtacctgcagatgaacagcctgcggcccgaggataccgccgtgtactactgcagaatgtccagcgtgaccagaggctccagcgactactggggccagggaacacttgtgaccgtgtccagtctcgagggaggaggcggctccgggggaggcggaagtggaggcggaggatctgggtctggaggaagcggatctggaggctcagggtcagggggctcaggcagtggaggctctttcgaagtgcaactggtggaatctggaggctctctggtgcagccagggggaagcctgagactgtcttgtgccgcttccggcttcaccttcgacgactacgccatgagctgggtgcgccaggtgccaggcaaaggcctggaatgggtgtccagcatcaactggagcggcacccacaccgattacgccgactccgtgaaaggcagattcacaatcagcagaaacaacgccaacaataccctgtacctgcagatgaactccctgaagtctgaggatacagcagtgtattattgcgccaagaactggcgggacgccggcaccacttggtttgagaaaagcggctctgccggacagggaacccaagtgacagtgtcctccacgcgtgagcagaaactgatctcggaagaggatctggcgaagcccaccacgacgccagcgccgcgaccaccaacaccggcgcccaccatcgcgtcgcagcccctgtccctgcgcccagaggcgtgccggccagcggcggggggcgcagtgcacacgagggggctggacttcgcctgtgacatctacatctgggcgcccttggccgggacttgtggggtccttctcctgtcactggttatcaccctttactgcaaacggggcagaaagaaactcctgtatatattcaaacaaccatttatgagaccagtacaaactactcaagaggaagatggctgtagctgccgatttccagaagaagaagaaggaggatgtgaactgagagtgaagttcagcaggagcgcagacgcccccgcgtaccagcagggccagaaccagctctataacgagctgaatctaggacgaagagaggagtacgatgttttggacaagagacgtggccgggaccctgagatggggggaaagccgagaaggaagaaccctcaggaaggcctgtacaatgaactgcagaaagataagatggcggaggcctacagtgagattgggatgaaaggcgagcgccggaggggcaaggggcacgatggcctttaccagggtctcagtacagccaccaaggacacctacgacgcccttcacatgcaggccctgccccctcgctctagtggctccggcgagggcagaggaagtctactaacctgcggagatgtggaagaaaatcctggcccacatatgaccgagtacaagcccacggtgcgcctcgccacccgcgacgacgtccccagggccgtacgcaccctcgccgccgcgttcgccgactaccccgccacgcgccacaccgtcgatccggaccgccacatcgagcgggtcaccgagctgcaagaactcttcctcacgcgcgtcgggctcgacatcggcaaggtgtgggtcgcggacgacggcgccgcggtggcggtctggaccacgccggagagcgtcgaagcgggggcggtgttcgccgagatcggcccgcgcatggccgagttgagcggttcccggctggccgcgcagcaacagatggaaggcctcctggcgccgcaccggcccaaggagcccgcgtggttcctggccaccgtcggcgtctcgcccgaccaccagggcaagggtctgggcagcgccgtcgtgctccccggagtggaggcggccgagcgcgccggggtgcccgccttcctggagacctccgcgccccgcaacctccccttctacgagcggctcggcttcaccgtcaccgccgacgtcgaggtgcccgaaggaccgcgcacctggtgcatgacccgcaagcccggtgcctga

SEQ ID NO: 1628 - DNA, 2172 bp, Artificial Sequence
  Synthetic Polynucleotides
atggccttaccagtgaccgccttgctcctgccgctggccttgctgctccacgccgccaggccggaccagagcgtgctgacacagcctcctagcgtgtcagtggcccctggcaagaccgccagaatcccctgcgagggcaactacatcggcagcagcaacgtgcactggtatcagcagaagcccggccaggctcccgtgctcgtgatccacttcgacagcgacagacccagcggcatccccgacagattcagcggcagcaacagcggcaacatggctaccctgaccatcagcagagtggaagccggggacgaggccgactactactgtcaagtgtgggagaaccacggctgggtgttcggcggaggcaccaagctgacagtgctgtctggcggaggcggaagtggaggcggaggatctggcggcggaggctctgaggtgcaactggtggaaacaggcggcggactggtgcagcctggcgagtctctgagactgagctgtgccgccagcggcttcaccttcagcgactacgagatgaactgggtgcgccaggcccctggaaagggcctggaatgggtgtcctacatcagcagctccggcagcaccatctactacgccgacagcgtgaagggccggtttaccatctaccgggacaacgccaagaacagcctgtacctccagatgaactccctgcgggccgaggacaccgccctgtactattgtgccagagcctggggcgtgggaccccctgattattggggacagggcaccctcgtgaccgtgtcctctacgcgtgagcagaaactgatctcggaagaggatctggcgaagcccaccacgacgccagcgccgcgaccaccaacaccggcgcccaccatcgcgtcgcagcccctgtccctgcgcccagaggcgtgccggccagcggcggggggcgcagtgcacacgagggggctggacttcgcctgtgacatctacatctgggcgcccttggccgggacttgtggggtccttctcctgtcactggttatcaccctttactgcaaacggggcagaaagaaactcctgtatatattcaaacaaccatttatgagaccagtacaaactactcaagaggaagatggctgtagctgccgatttccagaagaagaagaaggaggatgtgaactgagagtgaagttcagcaggagcgcagacgcccccgcgtaccagcagggccagaaccagctctataacgagctgaatctaggacgaagagaggagtacgatgttttggacaagagacgtggccgggaccctgagatggggggaaagccgagaaggaagaaccctcaggaaggcctgtacaatgaactgcagaaagataagatggcggaggcctacagtgagattgggatgaaaggcgagcgccggaggggcaaggggcacgatggcctttaccagggtctcagtacagccaccaaggacacctacgacgcccttcacatgcaggccctgccccctcgctctagtggctccggcgagggcagaggaagtctactaacctgcggagatgtggaagaaaatcctggcccacatatgaccgagtacaagcccacggtgcgcctcgccacccgcgacgacgtccccagggccgtacgcaccctcgccgccgcgttcgccgactaccccgccacgcgccacaccgtcgatccggaccgccacatcgagcgggtcaccgagctgcaagaactcttcctcacgcgcgtcgggctcgacatcggcaaggtgtgggtcgcggacgacggcgccgcggtggcggtctggaccacgccggagagcgtcgaagcgggggcggtgttcgccgagatcggcccgcgcatggccgagttgagcggttcccggctggccgcgcagcaacagatggaaggcctcctggcgccgcaccggcccaaggagcccgcgtggttcctggccaccgtcggcgtctcgcccgaccaccagggcaagggtctgggcagcgccgtcgtgctccccggagtggaggcggccgagcgcgccggggtgcccgccttcctggagacctccgcgccccgcaacctccccttctacgagcggctcggcttcaccgtcaccgccgacgtcgaggtgcccgaaggaccgcgcacctggtgcatgacccgcaagcccggtgcctga

SEQ ID NO: 1629 - DNA, 2196 bp, Artificial Sequence
  Synthetic Polynucleotides
atggccttaccagtgaccgccttgctcctgccgctggccttgctgctccacgccgccaggccggacatccagatgacccagagccccagcagcctgtctgccagcgtgggcgataccgtgaccatcacctgtcaggccaacggctacctgaactggtatcagcagcggagaggcaaggcccccaagctgctgatctacgacggcagcaagctggaaagaggcgtgcccagcagattcagcggcagaagatggggccaggagtacaacctgaccatcaacaacctccagcccgaggatattgccacatacttttgccaggtgtacgagttcgtggtgcccggcacacggctggacctgaagagaacagtggctgctcctggcggaggcggaagtggaggcggaggatctggcggcggaggctctcaggtgcagctgctccagtctggcgctgccgtgacaaagcctggcgcttctgtgcgggtgtcctgtgaagccagcggctacaacatccgggactacttcatccactggtggcggcaggctccaggccagggactccagtgggtgggatggatcaaccccaagaccggccagcccaacaaccccagacagttccagggcagagtgtccctgaccagacacgccagctgggacttcgacaccttcagcttctacatggatctgaaggccctgcggagcgacgataccgccgtgtacttctgcgccagacagagaagcgactactgggatttcgacgtgtggggcagcggcacccaagtgacagtgtctagcgccagcaccaagggacccacgcgtgagcagaaactgatctcggaagaggatctggcgaagcccaccacgacgccagcgccgcgaccaccaacaccggcgcccaccatcgcgtcgcagcccctgtccctgcgcccagaggcgtgccggccagcggcggggggcgcagtgcacacgagggggctggacttcgcctgtgacatctacatctgggcgcccttggccgggacttgtggggtccttctcctgtcactggttatcaccctttactgcaaacggggcagaaagaaactcctgtatatattcaaacaaccatttatgagaccagtacaaactactcaagaggaagatggctgtagctgccgatttccagaagaagaagaaggaggatgtgaactgagagtgaagttcagcaggagcgcagacgcccccgcgtaccagcagggccagaaccagctctataacgagctgaatctaggacgaagagaggagtacgatgttttggacaagagacgtggccgggaccctgagatggggggaaagccgagaaggaagaaccctcaggaaggcctgtacaatgaactgcagaaagataagatggcggaggcctacagtgagattgggatgaaaggcgagcgccggaggggcaaggggcacgatggcctttaccagggtctcagtacagccaccaaggacacctacgacgcccttcacatgcaggccctgccccctcgctctagtggctccggcgagggcagaggaagtctactaacctgcggagatgtggaagaaaatcctggcccacatatgaccgagtacaagcccacggtgcgcctcgccacccgcgacgacgtccccagggccgtacgcaccctcgccgccgcgttcgccgactaccccgccacgcgccacaccgtcgatccggaccgccacatcgagcgggtcaccgagctgcaagaactcttcctcacgcgcgtcgggctcgacatcggcaaggtgtgggtcgcggacgacggcgccgcggtggcggtctggaccacgccggagagcgtcgaagcgggggcggtgttcgccgagatcggcccgcgcatggccgagttgagcggttcccggctggccgcgcagcaacagatggaaggcctcctggcgccgcaccggcccaaggagcccgcgtggttcctggccaccgtcggcgtctcgcccgaccaccagggcaagggtctgggcagcgccgtcgtgctccccggagtggaggcggccgagcgcgccggggtgcccgccttcctggagacctccgcgccccgcaacctccccttctacgagcggctcggcttcaccgtcaccgccgacgtcgaggtgcccgaaggaccgcgcacctggtgcatgacccgcaagcccggtgcctga

SEQ ID NO: 1630 - DNA, 2214 bp, Artificial Sequence
  Synthetic Polynucleotides
atggccttaccagtgaccgccttgctcctgccgctggccttgctgctccacgccgccaggccgcagtctgccctgacacagcctcctagcgcctctggctctcccggccagagcatcaccatcagctgtaccggcaccagcaacaacttcgtgtcctggtatcagcagcacgccggcaaggcccccaagctcgtgatctacgacgtgaacaagcggcccagcggcgtgcccgatagattcagcggcagcaagagcggcaacaccgccagcctgacagtgtctggcctccagaccgatgacgaggccgtgtactactgcggcagcctcgtgggcaactgggacgtgatctttggcggaggcaccaagctgaccgtgctgggcggaggcggaagtggaggcggaggatctggcggcggaggctctcagccccagctccaggaatctggccccacactggtggaagccagcgagacactgagcctgacctgtgccgtgtccggcgattctaccgccgcctgcaatagcttctggggctgggtgcgccagcctcctggaaagggactggaatgggtgggaagcctgagccactgcgccagctattggaaccggggctggacctaccacaaccccagcctgaagtccagactgaccctggccctggacacccccaagaacctggtgttcctgaagctgaacagcgtgacagccgccgacaccgccacctactactgtgccagatttggcggcgaggtgctgcggtacaccgactggcctaaacctgcctgggtggacctgtggggcagaggaacactcgtgaccgtgtccagcacgcgtgagcagaaactgatctcggaagaggatctggcgaagcccaccacgacgccagcgccgcgaccaccaacaccggcgcccaccatcgcgtcgcagcccctgtccctgcgcccagaggcgtgccggccagcggcggggggcgcagtgcacacgagggggctggacttcgcctgtgacatctacatctgggcgcccttggccgggacttgtggggtccttctcctgtcactggttatcaccctttactgcaaacggggcagaaagaaactcctgtatatattcaaacaaccatttatgagaccagtacaaactactcaagaggaagatggctgtagctgccgatttccagaagaagaagaaggaggatgtgaactgagagtgaagttcagcaggagcgcagacgcccccgcgtaccagcagggccagaaccagctctataacgagctgaatctaggacgaagagaggagtacgatgttttggacaagagacgtggccgggaccctgagatggggggaaagccgagaaggaagaaccctcaggaaggcctgtacaatgaactgcagaaagataagatggcggaggcctacagtgagattgggatgaaaggcgagcgccggaggggcaaggggcacgatggcctttaccagggtctcagtacagccaccaaggacacctacgacgcccttcacatgcaggccctgccccctcgctctagtggctccggcgagggcagaggaagtctactaacctgcggagatgtggaagaaaatcctggcccacatatgaccgagtacaagcccacggtgcgcctcgccacccgcgacgacgtccccagggccgtacgcaccctcgccgccgcgttcgccgactaccccgccacgcgccacaccgtcgatccggaccgccacatcgagcgggtcaccgagctgcaagaactcttcctcacgcgcgtcgggctcgacatcggcaaggtgtgggtcgcggacgacggcgccgcggtggcggtctggaccacgccggagagcgtcgaagcgggggcggtgttcgccgagatcggcccgcgcatggccgagttgagcggttcccggctggccgcgcagcaacagatggaaggcctcctggcgccgcaccggcccaaggagcccgcgtggttcctggccaccgtcggcgtctcgcccgaccaccagggcaagggtctgggcagcgccgtcgtgctccccggagtggaggcggccgagcgcgccggggtgcccgccttcctggagacctccgcgccccgcaacctccccttctacgagcggctcggcttcaccgtcaccgccgacgtcgaggtgcccgaaggaccgcgcacctggtgcatgacccgcaagcccggtgcctga

SEQ ID NO: 1631 - DNA, 2169 bp, Artificial Sequence
  Synthetic Polynucleotides
atggccttaccagtgaccgccttgctcctgccgctggccttgctgctccacgccgccaggccggagatcgtgctgacacagagccctggcaccctgagcctgtctccaggcgagacagccatcatcagctgccggacaagccagtacggcagcctggcctggtatcagcagaggccaggacaggcccccagactcgtgatctacagcggcagcacaagagccgccggaatccccgatagattcagcggctccagatggggacccgactacaacctgaccatcagcaacctggaaagcggcgacttcggcgtgtactactgccagcagtacgagttcttcggccagggcaccaaggtgcaggtggacatcaaaagaggcggaggcggaagtggaggcggaggatctggcggcggaggctctcaggtgcagctggtgcagtctggcggccagatgaagaaacccggcgagagcatgagaatcagctgtcgggcctccggctacgagttcatcgactgcaccctgaactggatcagactggcccctggcaagcggcctgagtggatgggatggctgaagcctagaggcggagccgtgaactacgccagacctctccagggcagagtgaccatgaccagggacgtgtacagcgataccgccttcctggaactgcggagcctgaccgtggatgataccgccgtgtacttctgcaccagaggcaagaactgcgattacaactgggacttcgagcactggggcagaggcacccctgtgatcgtgtctagcacgcgtgagcagaaactgatctcggaagaggatctggcgaagcccaccacgacgccagcgccgcgaccaccaacaccggcgcccaccatcgcgtcgcagcccctgtccctgcgcccagaggcgtgccggccagcggcggggggcgcagtgcacacgagggggctggacttcgcctgtgacatctacatctgggcgcccttggccgggacttgtggggtccttctcctgtcactggttatcaccctttactgcaaacggggcagaaagaaactcctgtatatattcaaacaaccatttatgagaccagtacaaactactcaagaggaagatggctgtagctgccgatttccagaagaagaagaaggaggatgtgaactgagagtgaagttcagcaggagcgcagacgcccccgcgtaccagcagggccagaaccagctctataacgagctgaatctaggacgaagagaggagtacgatgttttggacaagagacgtggccgggaccctgagatggggggaaagccgagaaggaagaaccctcaggaaggcctgtacaatgaactgcagaaagataagatggcggaggcctacagtgagattgggatgaaaggcgagcgccggaggggcaaggggcacgatggcctttaccagggtctcagtacagccaccaaggacacctacgacgcccttcacatgcaggccctgccccctcgctctagtggctccggcgagggcagaggaagtctactaacctgcggagatgtggaagaaaatcctggcccacatatgaccgagtacaagcccacggtgcgcctcgccacccgcgacgacgtccccagggccgtacgcaccctcgccgccgcgttcgccgactaccccgccacgcgccacaccgtcgatccggaccgccacatcgagcgggtcaccgagctgcaagaactcttcctcacgcgcgtcgggctcgacatcggcaaggtgtgggtcgcggacgacggcgccgcggtggcggtctggaccacgccggagagcgtcgaagcgggggcggtgttcgccgagatcggcccgcgcatggccgagttgagcggttcccggctggccgcgcagcaacagatggaaggcctcctggcgccgcaccggcccaaggagcccgcgtggttcctggccaccgtcggcgtctcgcccgaccaccagggcaagggtctgggcagcgccgtcgtgctccccggagtggaggcggccgagcgcgccggggtgcccgccttcctggagacctccgcgccccgcaacctccccttctacgagcggctcggcttcaccgtcaccgccgacgtcgaggtgcccgaaggaccgcgcacctggtgcatgacccgcaagcccggtgcctga

SEQ ID NO: 1632 - DNA, 2199 bp, Artificial Sequence
  Synthetic Polynucleotides
atggccttaccagtgaccgccttgctcctgccgctggccttgctgctccacgccgccaggccggagctggtgctgacacagagccctggcaccctgtctctgtctgccggcgaaagagccaccctgagctgtagagccagccagagcgtgtcctctggcagcctggcttggtatcagcagaagccaggccaggcccccagactgctgatctacggcgcttctaccagagccaccggcatccccgatagattcagcggctctggctccggcaccgacttcaccctgacaatcggcagactggaacccgaggacctggccgtgtactactgccagcagtacggcaccagcccctacacattcggccagggcaccaagctggaaatcggcggaggcggaagtggaggcggaggatctggcggcggaggctctctggaacagagcggagccgaagtgaagaaacccggcagcagcgtgcaggtgtcctgcaaagcaagcggcggcaccttctctatgtacggcttcaactgggtgcgccaggctcctggacacggcctggaatggatgggcggcatcatccccatcttcggcacctccaactacgcccagaaattccggggcagagtgaccttcaccgccgaccaggccacaagcaccgcctacatggaactgaccaacctgcggagcgacgacaccgccgtgtattattgcgccagagacttcggccccgactgggaggatggcgacagctacgatggcagcggcagaggcttcttcgacttctggggccagggaacccttgtgaccgtgtcctcaacgcgtgagcagaaactgatctcggaagaggatctggcgaagcccaccacgacgccagcgccgcgaccaccaacaccggcgcccaccatcgcgtcgcagcccctgtccctgcgcccagaggcgtgccggccagcggcggggggcgcagtgcacacgagggggctggacttcgcctgtgacatctacatctgggcgcccttggccgggacttgtggggtccttctcctgtcactggttatcaccctttactgcaaacggggcagaaagaaactcctgtatatattcaaacaaccatttatgagaccagtacaaactactcaagaggaagatggctgtagctgccgatttccagaagaagaagaaggaggatgtgaactgagagtgaagttcagcaggagcgcagacgcccccgcgtaccagcagggccagaaccagctctataacgagctgaatctaggacgaagagaggagtacgatgttttggacaagagacgtggccgggaccctgagatggggggaaagccgagaaggaagaaccctcaggaaggcctgtacaatgaactgcagaaagataagatggcggaggcctacagtgagattgggatgaaaggcgagcgccggaggggcaaggggcacgatggcctttaccagggtctcagtacagccaccaaggacacctacgacgcccttcacatgcaggccctgccccctcgctctagtggctccggcgagggcagaggaagtctactaacctgcggagatgtggaagaaaatcctggcccacatatgaccgagtacaagcccacggtgcgcctcgccacccgcgacgacgtccccagggccgtacgcaccctcgccgccgcgttcgccgactaccccgccacgcgccacaccgtcgatccggaccgccacatcgagcgggtcaccgagctgcaagaactcttcctcacgcgcgtcgggctcgacatcggcaaggtgtgggtcgcggacgacggcgccgcggtggcggtctggaccacgccggagagcgtcgaagcgggggcggtgttcgccgagatcggcccgcgcatggccgagttgagcggttcccggctggccgcgcagcaacagatggaaggcctcctggcgccgcaccggcccaaggagcccgcgtggttcctggccaccgtcggcgtctcgcccgaccaccagggcaagggtctgggcagcgccgtcgtgctccccggagtggaggcggccgagcgcgccggggtgcccgccttcctggagacctccgcgccccgcaacctccccttctacgagcggctcggcttcaccgtcaccgccgacgtcgaggtgcccgaaggaccgcgcacctggtgcatgacccgcaagcccggtgcctga

SEQ ID NO: 1633 - DNA, 2187 bp, Artificial Sequence
  Synthetic Polynucleotides
atggccttaccagtgaccgccttgctcctgccgctggccttgctgctccacgccgccaggccggacgtggtcatgacacagagcccttctagcctgtctgccagcgtgggcgacagagtgacaatcacctgtcagagcagcctggacatcagccactacctgaactggtatcagcagaagcccggcaaggcccctaagctgctgatctacgacgccagcaatctggaaaccggcgtgcccagcagattttctggcagcggaagcggcacccacttcaccttcacaatatccagcctccagcctgaggacttcgccacctactactgccagcagtacgacaacctgcctctgacctttggcggaggcaccaagctggaaatcaagagaggcggaggcggaagtggaggcggaggatctggcggcggaggctctcaagttcaactggttcaatcaggcggaggcgtggtgcaacctggtggctctctgagagtgtcttgtgctgcctctggcgtgaccctgagcgactatggaatgcactgggtccgacaggcccctggcaaaggacttgagtgggtcgccttcatcagaaacgacggcagcgacaagtattacgccgacagcgtgaagggcagattcaccatcagccgggacaacagcgagaaaaccgtgtctctccagatgtctagcctgagagccgaggacaccgccgtgtactactgtgccaagaatggcgagagcggccctctggactactggtatctggatctgtggggcagaggcaccctggtcacagtctcttctacgcgtgagcagaaactgatctcggaagaggatctggcgaagcccaccacgacgccagcgccgcgaccaccaacaccggcgcccaccatcgcgtcgcagcccctgtccctgcgcccagaggcgtgccggccagcggcggggggcgcagtgcacacgagggggctggacttcgcctgtgacatctacatctgggcgcccttggccgggacttgtggggtccttctcctgtcactggttatcaccctttactgcaaacggggcagaaagaaactcctgtatatattcaaacaaccatttatgagaccagtacaaactactcaagaggaagatggctgtagctgccgatttccagaagaagaagaaggaggatgtgaactgagagtgaagttcagcaggagcgcagacgcccccgcgtaccagcagggccagaaccagctctataacgagctgaatctaggacgaagagaggagtacgatgttttggacaagagacgtggccgggaccctgagatggggggaaagccgagaaggaagaaccctcaggaaggcctgtacaatgaactgcagaaagataagatggcggaggcctacagtgagattgggatgaaaggcgagcgccggaggggcaaggggcacgatggcctttaccagggtctcagtacagccaccaaggacacctacgacgcccttcacatgcaggccctgccccctcgctctagtggctccggcgagggcagaggaagtctactaacctgcggagatgtggaagaaaatcctggcccacatatgaccgagtacaagcccacggtgcgcctcgccacccgcgacgacgtccccagggccgtacgcaccctcgccgccgcgttcgccgactaccccgccacgcgccacaccgtcgatccggaccgccacatcgagcgggtcaccgagctgcaagaactcttcctcacgcgcgtcgggctcgacatcggcaaggtgtgggtcgcggacgacggcgccgcggtggcggtctggaccacgccggagagcgtcgaagcgggggcggtgttcgccgagatcggcccgcgcatggccgagttgagcggttcccggctggccgcgcagcaacagatggaaggcctcctggcgccgcaccggcccaaggagcccgcgtggttcctggccaccgtcggcgtctcgcccgaccaccagggcaagggtctgggcagcgccgtcgtgctccccggagtggaggcggccgagcgcgccggggtgcccgccttcctggagacctccgcgccccgcaacctccccttctacgagcggctcggcttcaccgtcaccgccgacgtcgaggtgcccgaaggaccgcgcacctggtgcatgacccgcaagcccggtgcctga

SEQ ID NO: 1634 - DNA, 2187 bp, Artificial Sequence
  Synthetic Polynucleotides
atggccttaccagtgaccgccttgctcctgccgctggccttgctgctccacgccgccaggccggacgacatcgtgatgacccagagccaggacagcatggctaccagcgtgggcgagcgcgtgaccgtgaattgcaaggccagccagaacgtggacaccaacgtggcctggtatcagcagaagcccggccagtctcctgagcccctgctgttcagcgccagctacagatacaccggcgtgcccgacagattcagcggcagcggctctggcaccgacttcaccctgacaatcagcagcgtgcaggccgaggacgtggccgagtatttctgccagcagtacaacagctaccccctgaccttcggccagggcaccaagctggaaatcaagagaggcggaggcggaagtggaggcggaggatctggcggcggaggctctgaagtgcaggtggaagtgtctggcggcggactggtgcagcctggcggatctatgagactgagctgtgccgtgtccggcttcaccttcagcaactactggatgaactgggtgcgccagtcccccgagaagggcctggaatggatcgccgagatccggctgaagtccaacaacttcgcccggtactacgccgagagcgtgaagggcagattcaccatcagccgggacaacagcaagaacagcctgtacctccagatgatctccctgagagccgaggacaccgccatctactactgcaccagctacggcaactacgtgggccactacttcgaccactggggccagggaacactgctgaccgtgtctagcacgcgtgagcagaaactgatctcggaagaggatctggcgaagcccaccacgacgccagcgccgcgaccaccaacaccggcgcccaccatcgcgtcgcagcccctgtccctgcgcccagaggcgtgccggccagcggcggggggcgcagtgcacacgagggggctggacttcgcctgtgacatctacatctgggcgcccttggccgggacttgtggggtccttctcctgtcactggttatcaccctttactgcaaacggggcagaaagaaactcctgtatatattcaaacaaccatttatgagaccagtacaaactactcaagaggaagatggctgtagctgccgatttccagaagaagaagaaggaggatgtgaactgagagtgaagttcagcaggagcgcagacgcccccgcgtaccagcagggccagaaccagctctataacgagctgaatctaggacgaagagaggagtacgatgttttggacaagagacgtggccgggaccctgagatggggggaaagccgagaaggaagaaccctcaggaaggcctgtacaatgaactgcagaaagataagatggcggaggcctacagtgagattgggatgaaaggcgagcgccggaggggcaaggggcacgatggcctttaccagggtctcagtacagccaccaaggacacctacgacgcccttcacatgcaggccctgccccctcgctctagtggctccggcgagggcagaggaagtctactaacctgcggagatgtggaagaaaatcctggcccacatatgaccgagtacaagcccacggtgcgcctcgccacccgcgacgacgtccccagggccgtacgcaccctcgccgccgcgttcgccgactaccccgccacgcgccacaccgtcgatccggaccgccacatcgagcgggtcaccgagctgcaagaactcttcctcacgcgcgtcgggctcgacatcggcaaggtgtgggtcgcggacgacggcgccgcggtggcggtctggaccacgccggagagcgtcgaagcgggggcggtgttcgccgagatcggcccgcgcatggccgagttgagcggttcccggctggccgcgcagcaacagatggaaggcctcctggcgccgcaccggcccaaggagcccgcgtggttcctggccaccgtcggcgtctcgcccgaccaccagggcaagggtctgggcagcgccgtcgtgctccccggagtggaggcggccgagcgcgccggggtgcccgccttcctggagacctccgcgccccgcaacctccccttctacgagcggctcggcttcaccgtcaccgccgacgtcgaggtgcccgaaggaccgcgcacctggtgcatgacccgcaagcccggtgcctga

SEQ ID NO: 1635 - DNA, 2199 bp, Artificial Sequence
  Synthetic Polynucleotides
atggccttaccagtgaccgccttgctcctgccgctggccttgctgctccacgccgccaggccgagctacgagctgacacagcctccatccgtgtctggcacacctggacagagagtggctatctcctgtagcggcagcagcagcaacatcggcaccagaatggtcacctggtatcagcacgtgccaggcacagcccctaagctgctgatcttcaacaacaaccagcggcctagcggcgtgcccgatagattttctgccagcaagagcggcacaagcgccagcctggctatcatcggactccagtctgacgacgaggccgactactactgtgccacctgggacgacaacgtgaagtcctacgtgttcggcaccggcaccaaagtgacagtgcttggaagtagaggcggaggcggaagtggaggcggaggatctggcggcggaggctctcttgaaatggcccaggttcagctccagcagtggggagctggactgctgaagcctagcgagacactgagcctgacctgtgctgtgtacggcggcagcttcagcggctactactggtcctggatcagacagcctcctggcaaaggactggaatggatcggcgagatcaaccacagcggctccaccaactacaaccccagcctgaagtccagagtgaccatcagcgtggacaccagcaagaaccagttctccctgaagctgagcagcgtgacagccgctgataccgccgtgtactattgcgctagagcccctcagtcttggtacgtgggagatgtgtggggccagggcacactggttacagtgtcatctacgcgtgagcagaaactgatctcggaagaggatctggcgaagcccaccacgacgccagcgccgcgaccaccaacaccggcgcccaccatcgcgtcgcagcccctgtccctgcgcccagaggcgtgccggccagcggcggggggcgcagtgcacacgagggggctggacttcgcctgtgacatctacatctgggcgcccttggccgggacttgtggggtccttctcctgtcactggttatcaccctttactgcaaacggggcagaaagaaactcctgtatatattcaaacaaccatttatgagaccagtacaaactactcaagaggaagatggctgtagctgccgatttccagaagaagaagaaggaggatgtgaactgagagtgaagttcagcaggagcgcagacgcccccgcgtaccagcagggccagaaccagctctataacgagctgaatctaggacgaagagaggagtacgatgttttggacaagagacgtggccgggaccctgagatggggggaaagccgagaaggaagaaccctcaggaaggcctgtacaatgaactgcagaaagataagatggcggaggcctacagtgagattgggatgaaaggcgagcgccggaggggcaaggggcacgatggcctttaccagggtctcagtacagccaccaaggacacctacgacgcccttcacatgcaggccctgccccctcgctctagtggctccggcgagggcagaggaagtctactaacctgcggagatgtggaagaaaatcctggcccacatatgaccgagtacaagcccacggtgcgcctcgccacccgcgacgacgtccccagggccgtacgcaccctcgccgccgcgttcgccgactaccccgccacgcgccacaccgtcgatccggaccgccacatcgagcgggtcaccgagctgcaagaactcttcctcacgcgcgtcgggctcgacatcggcaaggtgtgggtcgcggacgacggcgccgcggtggcggtctggaccacgccggagagcgtcgaagcgggggcggtgttcgccgagatcggcccgcgcatggccgagttgagcggttcccggctggccgcgcagcaacagatggaaggcctcctggcgccgcaccggcccaaggagcccgcgtggttcctggccaccgtcggcgtctcgcccgaccaccagggcaagggtctgggcagcgccgtcgtgctccccggagtggaggcggccgagcgcgccggggtgcccgccttcctggagacctccgcgccccgcaacctccccttctacgagcggctcggcttcaccgtcaccgccgacgtcgaggtgcccgaaggaccgcgcacctggtgcatgacccgcaagcccggtgcctga

SEQ ID NO: 1636 - DNA, 2190 bp, Artificial Sequence
  Synthetic Polynucleotides
atggccttaccagtgaccgccttgctcctgccgctggccttgctgctccacgccgccaggccgcagtctgtgctgacacagcctcctagcctgtctgtggcccctggaaagacagccagcatcacatgcggcggcaacaacatcggcatgaagtccgtgcactggtatcagcagaggccaggacaggctcctgtgctggtcatctactacgacagcgacagaccctctggcatccccggcagattttccggcagcaactctggcaataccgccacactgaccatctccagagtggaagctggcgacgaggccgactactactgccaagtgtgggataccaccggcgatcaccctggctatgtgtttggcaccggcaccaaagtgacagtgcttggcggaggcggaagtggaggcggaggatctggcggcggaggctctcaagttcaactggttcagagcggagccgaagtgaagaaacctggcagcagcgtgaaggtgtcctgcaaagcaagcggcggcacctttagcagctacgccatctcttgggtccgacaggcacctggacaaggactggaatggatgggcggcatcatccccatcttcggcacagccaattacgcccagaaattccagggcagagtgaccatcaccgccgacgagtctacaagcaccgcctacatggaactgagcagcctgagaagcgaggacaccgccgtgtactattgtgccagaggcgtgtacggctacagcggctctgccccttatgatgagtggggccagggaaccctggtcaccgtttcttctacgcgtgagcagaaactgatctcggaagaggatctggcgaagcccaccacgacgccagcgccgcgaccaccaacaccggcgcccaccatcgcgtcgcagcccctgtccctgcgcccagaggcgtgccggccagcggcggggggcgcagtgcacacgagggggctggacttcgcctgtgacatctacatctgggcgcccttggccgggacttgtggggtccttctcctgtcactggttatcaccctttactgcaaacggggcagaaagaaactcctgtatatattcaaacaaccatttatgagaccagtacaaactactcaagaggaagatggctgtagctgccgatttccagaagaagaagaaggaggatgtgaactgagagtgaagttcagcaggagcgcagacgcccccgcgtaccagcagggccagaaccagctctataacgagctgaatctaggacgaagagaggagtacgatgttttggacaagagacgtggccgggaccctgagatggggggaaagccgagaaggaagaaccctcaggaaggcctgtacaatgaactgcagaaagataagatggcggaggcctacagtgagattgggatgaaaggcgagcgccggaggggcaaggggcacgatggcctttaccagggtctcagtacagccaccaaggacacctacgacgcccttcacatgcaggccctgccccctcgctctagtggctccggcgagggcagaggaagtctactaacctgcggagatgtggaagaaaatcctggcccacatatgaccgagtacaagcccacggtgcgcctcgccacccgcgacgacgtccccagggccgtacgcaccctcgccgccgcgttcgccgactaccccgccacgcgccacaccgtcgatccggaccgccacatcgagcgggtcaccgagctgcaagaactcttcctcacgcgcgtcgggctcgacatcggcaaggtgtgggtcgcggacgacggcgccgcggtggcggtctggaccacgccggagagcgtcgaagcgggggcggtgttcgccgagatcggcccgcgcatggccgagttgagcggttcccggctggccgcgcagcaacagatggaaggcctcctggcgccgcaccggcccaaggagcccgcgtggttcctggccaccgtcggcgtctcgcccgaccaccagggcaagggtctgggcagcgccgtcgtgctccccggagtggaggcggccgagcgcgccggggtgcccgccttcctggagacctccgcgccccgcaacctccccttctacgagcggctcggcttcaccgtcaccgccgacgtcgaggtgcccgaaggaccgcgcacctggtgcatgacccgcaagcccggtgcctga

SEQ ID NO: 1637 - DNA, 2208 bp, Artificial Sequence
  Synthetic Polynucleotides
atggccttaccagtgaccgccttgctcctgccgctggccttgctgctccacgccgccaggccggacgagatcgtgctgacccagagccctctgagcctgcctgtgacacctggcgagcctgccagcatctcctgtagaagcagccagagcctgctgcacagcaacggctacaactacctggactggtatctccagaagcccggccagagcccccaactgctgatctacctgggcagcaacagagccagcggcgtgcccgatagattttccggcagcggctccggcaccgacttcaccctgaagatcagccgggtggaagccgaggacgtgggcgtgtactactgtatgcaggccctccagaccccccggacctttggacagggcaccaaggtggaaatcaagcggggcggaggcggaagtggaggcggaggatctggcggcggaggctctcaggtgcaactggtgcagtctggcggcggagtggtgcagcctggaagaagcctgagactgagctgtgccgccagcggcttcaccttcagcagctacggaatgcactgggtgcgccaggcccctggcaaaggactggaatgggtggccgtgatctcctacgacggctccaacaagtattacgccgacagcgtgaagggccggttcaccatctccagagacaacagcaagaacaccctgtacctccagatgaacagcctgcgggccgaggacaccgccgtgtactattgcgccagagacttcgactacggcgacagctactactactatggcatggacgtgtggggccagggcacaaccgtgaccgtgtcatctacgcgtgagcagaaactgatctcggaagaggatctggcgaagcccaccacgacgccagcgccgcgaccaccaacaccggcgcccaccatcgcgtcgcagcccctgtccctgcgcccagaggcgtgccggccagcggcggggggcgcagtgcacacgagggggctggacttcgcctgtgacatctacatctgggcgcccttggccgggacttgtggggtccttctcctgtcactggttatcaccctttactgcaaacggggcagaaagaaactcctgtatatattcaaacaaccatttatgagaccagtacaaactactcaagaggaagatggctgtagctgccgatttccagaagaagaagaaggaggatgtgaactgagagtgaagttcagcaggagcgcagacgcccccgcgtaccagcagggccagaaccagctctataacgagctgaatctaggacgaagagaggagtacgatgttttggacaagagacgtggccgggaccctgagatggggggaaagccgagaaggaagaaccctcaggaaggcctgtacaatgaactgcagaaagataagatggcggaggcctacagtgagattgggatgaaaggcgagcgccggaggggcaaggggcacgatggcctttaccagggtctcagtacagccaccaaggacacctacgacgcccttcacatgcaggccctgccccctcgctctagtggctccggcgagggcagaggaagtctactaacctgcggagatgtggaagaaaatcctggcccacatatgaccgagtacaagcccacggtgcgcctcgccacccgcgacgacgtccccagggccgtacgcaccctcgccgccgcgttcgccgactaccccgccacgcgccacaccgtcgatccggaccgccacatcgagcgggtcaccgagctgcaagaactcttcctcacgcgcgtcgggctcgacatcggcaaggtgtgggtcgcggacgacggcgccgcggtggcggtctggaccacgccggagagcgtcgaagcgggggcggtgttcgccgagatcggcccgcgcatggccgagttgagcggttcccggctggccgcgcagcaacagatggaaggcctcctggcgccgcaccggcccaaggagcccgcgtggttcctggccaccgtcggcgtctcgcccgaccaccagggcaagggtctgggcagcgccgtcgtgctccccggagtggaggcggccgagcgcgccggggtgcccgccttcctggagacctccgcgccccgcaacctccccttctacgagcggctcggcttcaccgtcaccgccgacgtcgaggtgcccgaaggaccgcgcacctggtgcatgacccgcaagcccggtgcctga

SEQ ID NO: 1638 - DNA, 2190 bp, Artificial Sequence
  Synthetic Polynucleotides
atggccttaccagtgaccgccttgctcctgccgctggccttgctgctccacgccgccaggccggacgagatcgtgctgacacagagccctgccaccctgtctctgagccctggcgaaagagccaccctgagctgtagagccagccagagcgtgggcagctacctggcctggtatcagcagaagcctggcgctccccggctgctgatctacgatgcctctcacagagccaccggcatccccgccagattttctggcagcggctccggcaccgacttcaccctgacaatcagctccctggaacccgaggacttcgccgtgtactactgccagcagcggagcaactggccccccatgtataccttcggccagggcaccaagctggaaatcaagagaggcggaggcggaagtggaggcggaggatctggcggcggaggctctgaagtgcagctggtgcagtctggcgctgaggtgtccgtgaaggtgtcctgcaaagccagcggcggcaagaagcccggcagcacctttagcagctacaccatcagctgggtgcgccaggcacctggacagggcctggaatggatgggcggcatcatccccatcttcggcaccgccaactacgcccagaaattccagggcagagtgaccatcaccgccgacaagagcaccagcaccgcctacatggaactgagcagcctgcggagcgaggacacagccgtgtattattgtgccggcgacaccgacagcagcggctactatggcgctgtggactattggggccagggaaccctcgtgaccgtgtcctctacgcgtgagcagaaactgatctcggaagaggatctggcgaagcccaccacgacgccagcgccgcgaccaccaacaccggcgcccaccatcgcgtcgcagcccctgtccctgcgcccagaggcgtgccggccagcggcggggggcgcagtgcacacgagggggctggacttcgcctgtgacatctacatctgggcgcccttggccgggacttgtggggtccttctcctgtcactggttatcaccctttactgcaaacggggcagaaagaaactcctgtatatattcaaacaaccatttatgagaccagtacaaactactcaagaggaagatggctgtagctgccgatttccagaagaagaagaaggaggatgtgaactgagagtgaagttcagcaggagcgcagacgcccccgcgtaccagcagggccagaaccagctctataacgagctgaatctaggacgaagagaggagtacgatgttttggacaagagacgtggccgggaccctgagatggggggaaagccgagaaggaagaaccctcaggaaggcctgtacaatgaactgcagaaagataagatggcggaggcctacagtgagattgggatgaaaggcgagcgccggaggggcaaggggcacgatggcctttaccagggtctcagtacagccaccaaggacacctacgacgcccttcacatgcaggccctgccccctcgctctagtggctccggcgagggcagaggaagtctactaacctgcggagatgtggaagaaaatcctggcccacatatgaccgagtacaagcccacggtgcgcctcgccacccgcgacgacgtccccagggccgtacgcaccctcgccgccgcgttcgccgactaccccgccacgcgccacaccgtcgatccggaccgccacatcgagcgggtcaccgagctgcaagaactcttcctcacgcgcgtcgggctcgacatcggcaaggtgtgggtcgcggacgacggcgccgcggtggcggtctggaccacgccggagagcgtcgaagcgggggcggtgttcgccgagatcggcccgcgcatggccgagttgagcggttcccggctggccgcgcagcaacagatggaaggcctcctggcgccgcaccggcccaaggagcccgcgtggttcctggccaccgtcggcgtctcgcccgaccaccagggcaagggtctgggcagcgccgtcgtgctccccggagtggaggcggccgagcgcgccggggtgcccgccttcctggagacctccgcgccccgcaacctccccttctacgagcggctcggcttcaccgtcaccgccgacgtcgaggtgcccgaaggaccgcgcacctggtgcatgacccgcaagcccggtgcctga

SEQ ID NO: 1639 - DNA, 2139 bp, Artificial Sequence
  Synthetic Polynucleotides
atggccttaccagtgaccgccttgctcctgccgctggccttgctgctccacgccgccaggccggacatccagatgacccagagccccagcagcctgtctgccagcgtgggcgacagagtgaccatcacctgtcaggccagccaggacatcaacaactacctgaactggtatcagcagaagcccggcaaggcccccaagctgctgatctacgacgccagcaatctgcagaccggcgtgcccagcagattttccggctctggcagcggcaccgacttcaccttcaccatcgaggacattgccacctactactgccagcagtacaccttcggccctggcaccaaggtggacatcaaaggcggaggcggaagtggaggcggaggatctggcggcggaggctctgaagtgcaactgctggaatctggcggcggactggtgcagcctggcggatctctgagactgagctgtgccgccagcggcttcacctttagctggtacagcatgacctgggtgcgccaggcccctggcaaaggactggaatgggtgtccagcatcgtgccctggggcgatttcacccagtacgccgatagcgtgaagggccggttcaccatcagccgggacaacagcaagaacaccctgtacctgcagatgaacagcctgcgggccgaggacaccgccgtgtactattgtgccaagggacctggctggggcagcttcgatctgtggggcagaggaacccttgtgaccgtgtccagcacgcgtgagcagaaactgatctcggaagaggatctggcgaagcccaccacgacgccagcgccgcgaccaccaacaccggcgcccaccatcgcgtcgcagcccctgtccctgcgcccagaggcgtgccggccagcggcggggggcgcagtgcacacgagggggctggacttcgcctgtgacatctacatctgggcgcccttggccgggacttgtggggtccttctcctgtcactggttatcaccctttactgcaaacggggcagaaagaaactcctgtatatattcaaacaaccatttatgagaccagtacaaactactcaagaggaagatggctgtagctgccgatttccagaagaagaagaaggaggatgtgaactgagagtgaagttcagcaggagcgcagacgcccccgcgtaccagcagggccagaaccagctctataacgagctgaatctaggacgaagagaggagtacgatgttttggacaagagacgtggccgggaccctgagatggggggaaagccgagaaggaagaaccctcaggaaggcctgtacaatgaactgcagaaagataagatggcggaggcctacagtgagattgggatgaaaggcgagcgccggaggggcaaggggcacgatggcctttaccagggtctcagtacagccaccaaggacacctacgacgcccttcacatgcaggccctgccccctcgctctagtggctccggcgagggcagaggaagtctactaacctgcggagatgtggaagaaaatcctggcccacatatgaccgagtacaagcccacggtgcgcctcgccacccgcgacgacgtccccagggccgtacgcaccctcgccgccgcgttcgccgactaccccgccacgcgccacaccgtcgatccggaccgccacatcgagcgggtcaccgagctgcaagaactcttcctcacgcgcgtcgggctcgacatcggcaaggtgtgggtcgcggacgacggcgccgcggtggcggtctggaccacgccggagagcgtcgaagcgggggcggtgttcgccgagatcggcccgcgcatggccgagttgagcggttcccggctggccgcgcagcaacagatggaaggcctcctggcgccgcaccggcccaaggagcccgcgtggttcctggccaccgtcggcgtctcgcccgaccaccagggcaagggtctgggcagcgccgtcgtgctccccggagtggaggcggccgagcgcgccggggtgcccgccttcctggagacctccgcgccccgcaacctccccttctacgagcggctcggcttcaccgtcaccgccgacgtcgaggtgcccgaaggaccgcgcacctggtgcatgacccgcaagcccggtgcctga

SEQ ID NO: 1640 - DNA, 1806 bp, Artificial Sequence
  Synthetic Polynucleotides
atggactggatttggcgcatccttttccttgtcggcgctgctaccggcgcccattccgaggttcagttggtcgaatcaggcgggggcctcgtccaacccggcggaagcctgcggctgtcttgcgcagcaagtggtagtgtgttcaagatcaacgttatggcctggtatcgccaggctccgggaaaagggagagagctggttgcggggatcattagcggtggctccaccagctacgctgacagtgtgaagggaaggttcactatatcacgcgacaacgcaaagaatacattgtacctccagatgaatagcttgcggcccgaagacacggcagtctactattgtgcctttatcacaacagagagcgactatgacctgggccgccggtattgggggcagggaacccttgtgaccgtttcatccacgcgtgagcagaaactgatctcggaagaggatctggcgaagcccaccacgacgccagcgccgcgaccaccaacaccggcgcccaccatcgcgtcgcagcccctgtccctgcgcccagaggcgtgccggccagcggcggggggcgcagtgcacacgagggggctggacttcgcctgtgacatctacatctgggcgcccttggccgggacttgtggggtccttctcctgtcactggttatcaccctttactgcaaacggggcagaaagaaactcctgtatatattcaaacaaccatttatgagaccagtacaaactactcaagaggaagatggctgtagctgccgatttccagaagaagaagaaggaggatgtgaactgagagtgaagttcagcaggagcgcagacgcccccgcgtaccagcagggccagaaccagctctataacgagctgaatctaggacgaagagaggagtacgatgttttggacaagagacgtggccgggaccctgagatggggggaaagccgagaaggaagaaccctcaggaaggcctgtacaatgaactgcagaaagataagatggcggaggcctacagtgagattgggatgaaaggcgagcgccggaggggcaaggggcacgatggcctttaccagggtctcagtacagccaccaaggacacctacgacgcccttcacatgcaggccctgccccctcgctctagtggctccggcgagggcagaggaagtctactaacctgcggagatgtggaagaaaatcctggcccacatatgaccgagtacaagcccacggtgcgcctcgccacccgcgacgacgtccccagggccgtacgcaccctcgccgccgcgttcgccgactaccccgccacgcgccacaccgtcgatccggaccgccacatcgagcgggtcaccgagctgcaagaactcttcctcacgcgcgtcgggctcgacatcggcaaggtgtgggtcgcggacgacggcgccgcggtggcggtctggaccacgccggagagcgtcgaagcgggggcggtgttcgccgagatcggcccgcgcatggccgagttgagcggttcccggctggccgcgcagcaacagatggaaggcctcctggcgccgcaccggcccaaggagcccgcgtggttcctggccaccgtcggcgtctcgcccgaccaccagggcaagggtctgggcagcgccgtcgtgctccccggagtggaggcggccgagcgcgccggggtgcccgccttcctggagacctccgcgccccgcaacctccccttctacgagcggctcggcttcaccgtcaccgccgacgtcgaggtgcccgaaggaccgcgcacctggtgcatgacccgcaagcccggtgcctga

SEQ ID NO: 1641 - DNA, 2169 bp, Artificial Sequence
  Synthetic Polynucleotides
atggccttaccagtgaccgccttgctcctgccgctggccttgctgctccacgccgccaggccggacatccagatgacccagagccccagcagcctgtctgccagcgtgggcgacagagtgaccatcacctgtaccgccagcctgagcgtgtccagcacctacctgcactggtatcagcagaagcccggcagcagccccaagctgtggatctacagcaccagcaacctggcctccggcgtgcccagcagattttctggcagcggctctggcaccagctacaccctgaccatcagctccctccagcccgaggacttcgccacctactactgccaccagtaccacagaagccccctgacctttggcggaggcaccaaggtggaaatcaagagaggcggaggcggaagtggaggcggaggatctggcggcggaggctctgaagtgcaactggtggaatctggcggcggactggtgcagcctggcggatctctgagactgagctgtgccgccagcggcttcagcctgaccaaatacggcgtgcactgggtgcgccaggcccctggaaaaggactggaatgggtgggagtgaagtgggctggcggctccaccgactacaacagcgccctgatgagccggttcaccatcagcaaggacaacgccaagaacagcctgtacctccagatgaactccctgcgggccgaggacaccgccgtgtactactgtgccagagatcaccgggacgctatggactactggggccagggaacactcgtgaccgtgtcctctacgcgtgagcagaaactgatctcggaagaggatctggcgaagcccaccacgacgccagcgccgcgaccaccaacaccggcgcccaccatcgcgtcgcagcccctgtccctgcgcccagaggcgtgccggccagcggcggggggcgcagtgcacacgagggggctggacttcgcctgtgacatctacatctgggcgcccttggccgggacttgtggggtccttctcctgtcactggttatcaccctttactgcaaacggggcagaaagaaactcctgtatatattcaaacaaccatttatgagaccagtacaaactactcaagaggaagatggctgtagctgccgatttccagaagaagaagaaggaggatgtgaactgagagtgaagttcagcaggagcgcagacgcccccgcgtaccagcagggccagaaccagctctataacgagctgaatctaggacgaagagaggagtacgatgttttggacaagagacgtggccgggaccctgagatggggggaaagccgagaaggaagaaccctcaggaaggcctgtacaatgaactgcagaaagataagatggcggaggcctacagtgagattgggatgaaaggcgagcgccggaggggcaaggggcacgatggcctttaccagggtctcagtacagccaccaaggacacctacgacgcccttcacatgcaggccctgccccctcgctctagtggctccggcgagggcagaggaagtctactaacctgcggagatgtggaagaaaatcctggcccacatatgaccgagtacaagcccacggtgcgcctcgccacccgcgacgacgtccccagggccgtacgcaccctcgccgccgcgttcgccgactaccccgccacgcgccacaccgtcgatccggaccgccacatcgagcgggtcaccgagctgcaagaactcttcctcacgcgcgtcgggctcgacatcggcaaggtgtgggtcgcggacgacggcgccgcggtggcggtctggaccacgccggagagcgtcgaagcgggggcggtgttcgccgagatcggcccgcgcatggccgagttgagcggttcccggctggccgcgcagcaacagatggaaggcctcctggcgccgcaccggcccaaggagcccgcgtggttcctggccaccgtcggcgtctcgcccgaccaccagggcaagggtctgggcagcgccgtcgtgctccccggagtggaggcggccgagcgcgccggggtgcccgccttcctggagacctccgcgccccgcaacctccccttctacgagcggctcggcttcaccgtcaccgccgacgtcgaggtgcccgaaggaccgcgcacctggtgcatgacccgcaagcccggtgcctga

SEQ ID NO: 1642 - DNA, 2181 bp, Artificial Sequence
  Synthetic Polynucleotides
atggccttaccagtgaccgccttgctcctgccgctggccttgctgctccacgccgccaggccggacatccagatgacccagagccccagcagcctgtctgccagcgtgggcgacagagtgaccatcacatgcaaggccagccaggacgtgggaacagccgtggcctggtatcagcagaagcctggcaaggcccccaagctgctgatctacagcgccagctacagatccaccggcgtgcccagcagattttccggctctggcagcggcaccgacttcaccctgaccatctctagcctccagcccgaggacttcgccacctactactgccagcaccactactccgccccctggacatttggcggaggcaccaaggtggaaatcaagggcggaggcggaagtggaggcggaggatctggcggcggaggctctgaagtgcaactggtggaatcaggcggcggactggtgcagcctggcggatctctgagactgagctgtgccgccagcggcttcaccttcagcagaaacggcatgagctgggtgcgccaggcccctggaaaaggactggaatgggtggcaaccgtgtccagcggcggcagctacatctactacgccgacagcgtgaagggccggttcaccatctccagagacaacgccaagaacagcctgtacctccagatgaactccctgcgggccgaggacaccgccgtgtactattgtgccagacagggcaccaccgccctggctaccagattcttcgatgtgtggggccagggcaccctcgtgaccgtgtcatctacgcgtgagcagaaactgatctcggaagaggatctggcgaagcccaccacgacgccagcgccgcgaccaccaacaccggcgcccaccatcgcgtcgcagcccctgtccctgcgcccagaggcgtgccggccagcggcggggggcgcagtgcacacgagggggctggacttcgcctgtgacatctacatctgggcgcccttggccgggacttgtggggtccttctcctgtcactggttatcaccctttactgcaaacggggcagaaagaaactcctgtatatattcaaacaaccatttatgagaccagtacaaactactcaagaggaagatggctgtagctgccgatttccagaagaagaagaaggaggatgtgaactgagagtgaagttcagcaggagcgcagacgcccccgcgtaccagcagggccagaaccagctctataacgagctgaatctaggacgaagagaggagtacgatgttttggacaagagacgtggccgggaccctgagatggggggaaagccgagaaggaagaaccctcaggaaggcctgtacaatgaactgcagaaagataagatggcggaggcctacagtgagattgggatgaaaggcgagcgccggaggggcaaggggcacgatggcctttaccagggtctcagtacagccaccaaggacacctacgacgcccttcacatgcaggccctgccccctcgctctagtggctccggcgagggcagaggaagtctactaacctgcggagatgtggaagaaaatcctggcccacatatgaccgagtacaagcccacggtgcgcctcgccacccgcgacgacgtccccagggccgtacgcaccctcgccgccgcgttcgccgactaccccgccacgcgccacaccgtcgatccggaccgccacatcgagcgggtcaccgagctgcaagaactcttcctcacgcgcgtcgggctcgacatcggcaaggtgtgggtcgcggacgacggcgccgcggtggcggtctggaccacgccggagagcgtcgaagcgggggcggtgttcgccgagatcggcccgcgcatggccgagttgagcggttcccggctggccgcgcagcaacagatggaaggcctcctggcgccgcaccggcccaaggagcccgcgtggttcctggccaccgtcggcgtctcgcccgaccaccagggcaagggtctgggcagcgccgtcgtgctccccggagtggaggcggccgagcgcgccggggtgcccgccttcctggagacctccgcgccccgcaacctccccttctacgagcggctcggcttcaccgtcaccgccgacgtcgaggtgcccgaaggaccgcgcacctggtgcatgacccgcaagcccggtgcctga

SEQ ID NO: 1643 - DNA, 2199 bp, Artificial Sequence
  Synthetic Polynucleotides
atggccttaccagtgaccgccttgctcctgccgctggccttgctgctccacgccgccaggccggacatcgtgatgacccagagccccagcagcctgaccatgagcgtgggccagaaagtgaccatgtcctgcaagagcagccacagcctgctgaacagccggaaccagaagaactacctggcctggttccagcagaagcccggccagtcccccaagctgctggtgtacttcgcaagcacccgcgagagcggcgtgcccgacagattcatcggcagcggctccggcaccgacttcaccctgaccatcagcaacgtgcaggccgaggacctggccgactacttctgccagcagcactacaccaccctgcccaccttcggcggaggcaccaagctggaaatcaagggcggaggcggaagtggaggcggaggatctggcggcggaggctctcagatccagctggtgcagagcggccctgacctgaagaaacccggcgagacagtgaagatcagttgcaaggcctccggctacaccttcaccaacacaggcatgaactgggtcaagcaggcccctggcaagggcctgaagtggatgggctggatcaacacctacaccggcgagcccacctacgccgacgacttcaagggccggttcaccttcagcctggaaaccagcgccagcaccgcctacctgcagatcaacaacctgaagaacgaggacaccgccacctatttctgcaccagatggggctacggcagcagcctgtactacgccatggactactggggccagggcaccagcgtgaccgtgtcctctacgcgtgagcagaaactgatctcggaagaggatctggcgaagcccaccacgacgccagcgccgcgaccaccaacaccggcgcccaccatcgcgtcgcagcccctgtccctgcgcccagaggcgtgccggccagcggcggggggcgcagtgcacacgagggggctggacttcgcctgtgacatctacatctgggcgcccttggccgggacttgtggggtccttctcctgtcactggttatcaccctttactgcaaacggggcagaaagaaactcctgtatatattcaaacaaccatttatgagaccagtacaaactactcaagaggaagatggctgtagctgccgatttccagaagaagaagaaggaggatgtgaactgagagtgaagttcagcaggagcgcagacgcccccgcgtaccagcagggccagaaccagctctataacgagctgaatctaggacgaagagaggagtacgatgttttggacaagagacgtggccgggaccctgagatggggggaaagccgagaaggaagaaccctcaggaaggcctgtacaatgaactgcagaaagataagatggcggaggcctacagtgagattgggatgaaaggcgagcgccggaggggcaaggggcacgatggcctttaccagggtctcagtacagccaccaaggacacctacgacgcccttcacatgcaggccctgccccctcgctctagtggctccggcgagggcagaggaagtctactaacctgcggagatgtggaagaaaatcctggcccacatatgaccgagtacaagcccacggtgcgcctcgccacccgcgacgacgtccccagggccgtacgcaccctcgccgccgcgttcgccgactaccccgccacgcgccacaccgtcgatccggaccgccacatcgagcgggtcaccgagctgcaagaactcttcctcacgcgcgtcgggctcgacatcggcaaggtgtgggtcgcggacgacggcgccgcggtggcggtctggaccacgccggagagcgtcgaagcgggggcggtgttcgccgagatcggcccgcgcatggccgagttgagcggttcccggctggccgcgcagcaacagatggaaggcctcctggcgccgcaccggcccaaggagcccgcgtggttcctggccaccgtcggcgtctcgcccgaccaccagggcaagggtctgggcagcgccgtcgtgctccccggagtggaggcggccgagcgcgccggggtgcccgccttcctggagacctccgcgccccgcaacctccccttctacgagcggctcggcttcaccgtcaccgccgacgtcgaggtgcccgaaggaccgcgcacctggtgcatgacccgcaagcccggtgcctga

SEQ ID NO: 1644 - DNA, 2169 bp, Artificial Sequence
  Synthetic Polynucleotides
atggccttaccagtgaccgccttgctcctgccgctggccttgctgctccacgccgccaggccggacatccagatgacccagagcccccctagcctgtctgcctctgtgggcggcaaagtgaccatcacatgcaaggccagccaggacatcgaccgctacatggcctggtatcaggacaagcccggcaagggacccaagctgctgatccacgataccagcaccctccagcccggcatccccagcagattttctggcagcggctccggcagagactacagcttcagcatcagcaacctggaacccgaggacattgccacctactactgcctccagtacgacaacctgtggaccttcggcggaggcaccaagctggaaatcaagagaggcggaggcggaagtggaggcggaggatctggcggcggaggctctcaggtgcaactggtgcagagcggagccgagcttgtgaagcctggcgcttccgtgaagatgagctgcaaagccagcggctacatcttcaccaactacaacatccactgggtcaagaagtccccaggccagggcctggaatggatcggagccatctaccccggaaacggcgacgccccttacagccagaagttccaggacagagccaccctgaccgccgacaccagcagcagcaccacctacatggaactgagcagcctgaccagcgaggacagcgccgtgtactattgcgtgcgggccaactgggatgtggccttcgcctattggggccagggcacactggtgtccgtgtcctctacgcgtgagcagaaactgatctcggaagaggatctggcgaagcccaccacgacgccagcgccgcgaccaccaacaccggcgcccaccatcgcgtcgcagcccctgtccctgcgcccagaggcgtgccggccagcggcggggggcgcagtgcacacgagggggctggacttcgcctgtgacatctacatctgggcgcccttggccgggacttgtggggtccttctcctgtcactggttatcaccctttactgcaaacggggcagaaagaaactcctgtatatattcaaacaaccatttatgagaccagtacaaactactcaagaggaagatggctgtagctgccgatttccagaagaagaagaaggaggatgtgaactgagagtgaagttcagcaggagcgcagacgcccccgcgtaccagcagggccagaaccagctctataacgagctgaatctaggacgaagagaggagtacgatgttttggacaagagacgtggccgggaccctgagatggggggaaagccgagaaggaagaaccctcaggaaggcctgtacaatgaactgcagaaagataagatggcggaggcctacagtgagattgggatgaaaggcgagcgccggaggggcaaggggcacgatggcctttaccagggtctcagtacagccaccaaggacacctacgacgcccttcacatgcaggccctgccccctcgctctagtggctccggcgagggcagaggaagtctactaacctgcggagatgtggaagaaaatcctggcccacatatgaccgagtacaagcccacggtgcgcctcgccacccgcgacgacgtccccagggccgtacgcaccctcgccgccgcgttcgccgactaccccgccacgcgccacaccgtcgatccggaccgccacatcgagcgggtcaccgagctgcaagaactcttcctcacgcgcgtcgggctcgacatcggcaaggtgtgggtcgcggacgacggcgccgcggtggcggtctggaccacgccggagagcgtcgaagcgggggcggtgttcgccgagatcggcccgcgcatggccgagttgagcggttcccggctggccgcgcagcaacagatggaaggcctcctggcgccgcaccggcccaaggagcccgcgtggttcctggccaccgtcggcgtctcgcccgaccaccagggcaagggtctgggcagcgccgtcgtgctccccggagtggaggcggccgagcgcgccggggtgcccgccttcctggagacctccgcgccccgcaacctccccttctacgagcggctcggcttcaccgtcaccgccgacgtcgaggtgcccgaaggaccgcgcacctggtgcatgacccgcaagcccggtgcctga

SEQ ID NO: 1645 - DNA, 2172 bp, Artificial Sequence
  Synthetic Polynucleotides
atggccttaccagtgaccgccttgctcctgccgctggccttgctgctccacgccgccaggccggacatccagatgacccagagccctgccagcctgtctgcctctgtgggcgagacagtgaccatcacctgtcgggtgtccggcaacatccacaactacctggcctggtatcagcagaagcagggcaagagcccccaactgctggtgtacaacgccaagaccctggccgatggcgtgcccagcagattttctggctctggcagcggcacccagtacagcctgaagatcaacagcctccagcccgaggacttcggcagctactactgccagcacttctggtccaacccctacaccttcggcggaggcaccaagctggaaatcaagggcggaggcggaagtggaggcggaggatctggcggcggaggctctcaggtgcaactccagcagtctggcgcttccgtgaaggtgtcctgcaaggccagcgaactcgtgcggcctggcacaggctacgccttcaccaattacctgatcgagtgggtcaagcagaggcccggacagggcctggaatggatcggagtgattaacccaggcagcggcggcaccaactacaacgagaagttcaagggcaaggccaccctgaccgccgacaagagcagcagcacagcctacatgcaactgagcagcctgaccagcgacgacagcgccgtgtacttctgcgcccggtacagaagctacgactggtacttcgacgtgtggggagccggcaccaccgtgacagtgtcatctacgcgtgagcagaaactgatctcggaagaggatctggcgaagcccaccacgacgccagcgccgcgaccaccaacaccggcgcccaccatcgcgtcgcagcccctgtccctgcgcccagaggcgtgccggccagcggcggggggcgcagtgcacacgagggggctggacttcgcctgtgacatctacatctgggcgcccttggccgggacttgtggggtccttctcctgtcactggttatcaccctttactgcaaacggggcagaaagaaactcctgtatatattcaaacaaccatttatgagaccagtacaaactactcaagaggaagatggctgtagctgccgatttccagaagaagaagaaggaggatgtgaactgagagtgaagttcagcaggagcgcagacgcccccgcgtaccagcagggccagaaccagctctataacgagctgaatctaggacgaagagaggagtacgatgttttggacaagagacgtggccgggaccctgagatggggggaaagccgagaaggaagaaccctcaggaaggcctgtacaatgaactgcagaaagataagatggcggaggcctacagtgagattgggatgaaaggcgagcgccggaggggcaaggggcacgatggcctttaccagggtctcagtacagccaccaaggacacctacgacgcccttcacatgcaggccctgccccctcgctctagtggctccggcgagggcagaggaagtctactaacctgcggagatgtggaagaaaatcctggcccacatatgaccgagtacaagcccacggtgcgcctcgccacccgcgacgacgtccccagggccgtacgcaccctcgccgccgcgttcgccgactaccccgccacgcgccacaccgtcgatccggaccgccacatcgagcgggtcaccgagctgcaagaactcttcctcacgcgcgtcgggctcgacatcggcaaggtgtgggtcgcggacgacggcgccgcggtggcggtctggaccacgccggagagcgtcgaagcgggggcggtgttcgccgagatcggcccgcgcatggccgagttgagcggttcccggctggccgcgcagcaacagatggaaggcctcctggcgccgcaccggcccaaggagcccgcgtggttcctggccaccgtcggcgtctcgcccgaccaccagggcaagggtctgggcagcgccgtcgtgctccccggagtggaggcggccgagcgcgccggggtgcccgccttcctggagacctccgcgccccgcaacctccccttctacgagcggctcggcttcaccgtcaccgccgacgtcgaggtgcccgaaggaccgcgcacctggtgcatgacccgcaagcccggtgcctga

SEQ ID NO: 1646 - DNA, 2187 bp, Artificial Sequence
  Synthetic Polynucleotides
atggccttaccagtgaccgccttgctcctgccgctggccttgctgctccacgccgccaggccggacgacatccagatgacccagagccccagcagcctgtctgccagcgtgggcgacagagtgaccatcacctgtcggagcagccagcggatcgtgcacagcaacggcaacacctacctggaatggtatcagcagacccccggcaaggcccccaagctgctgatctacaaggtgtccaacagattcagcggcgtgcccagcaggtttagcggctctggcagcggcaccgactacacccctaccatctctagcctccagcccgaggacattgccacctactactgttttcaaggcagccacgtgccccccaccttcggccagggaacaaagctccagatcaccggcggaggcggaagtggaggcggaggatctggcggcggaggctctgaggtgcaactggtggaatctggcggcggagtggtgcagcctggcagaagcctgagactgagctgtagcagcagcggccctaccttcagcgactactacatgtactgggtgcgccaggcccctggcaagggactggaatgggtggcctacatgagcaacgtgggagccatcaccgattaccccgacaccgtgaagggcagacccaccatcagccgggacaacagcaagaataccctgttcctgatggacagcctgcggcccgaggataccggcgtgtacttttgcgccagaggcaccagggacggcagttggttcgcctattggggccagggcacacccgtgaccgtgtctagtacgcgtgagcagaaactgatctcggaagaggatctggcgaagcccaccacgacgccagcgccgcgaccaccaacaccggcgcccaccatcgcgtcgcagcccctgtccctgcgcccagaggcgtgccggccagcggcggggggcgcagtgcacacgagggggctggacttcgcctgtgacatctacatctgggcgcccttggccgggacttgtggggtccttctcctgtcactggttatcaccctttactgcaaacggggcagaaagaaactcctgtatatattcaaacaaccatttatgagaccagtacaaactactcaagaggaagatggctgtagctgccgatttccagaagaagaagaaggaggatgtgaactgagagtgaagttcagcaggagcgcagacgcccccgcgtaccagcagggccagaaccagctctataacgagctgaatctaggacgaagagaggagtacgatgttttggacaagagacgtggccgggaccctgagatggggggaaagccgagaaggaagaaccctcaggaaggcctgtacaatgaactgcagaaagataagatggcggaggcctacagtgagattgggatgaaaggcgagcgccggaggggcaaggggcacgatggcctttaccagggtctcagtacagccaccaaggacacctacgacgcccttcacatgcaggccctgccccctcgctctagtggctccggcgagggcagaggaagtctactaacctgcggagatgtggaagaaaatcctggcccacatatgaccgagtacaagcccacggtgcgcctcgccacccgcgacgacgtccccagggccgtacgcaccctcgccgccgcgttcgccgactaccccgccacgcgccacaccgtcgatccggaccgccacatcgagcgggtcaccgagctgcaagaactcttcctcacgcgcgtcgggctcgacatcggcaaggtgtgggtcgcggacgacggcgccgcggtggcggtctggaccacgccggagagcgtcgaagcgggggcggtgttcgccgagatcggcccgcgcatggccgagttgagcggttcccggctggccgcgcagcaacagatggaaggcctcctggcgccgcaccggcccaaggagcccgcgtggttcctggccaccgtcggcgtctcgcccgaccaccagggcaagggtctgggcagcgccgtcgtgctccccggagtggaggcggccgagcgcgccggggtgcccgccttcctggagacctccgcgccccgcaacctccccttctacgagcggctcggcttcaccgtcaccgccgacgtcgaggtgcccgaaggaccgcgcacctggtgcatgacccgcaagcccggtgcctga

SEQ ID NO: 1647 - DNA, 2169 bp, Artificial Sequence
  Synthetic Polynucleotides
atggccttaccagtgaccgccttgctcctgccgctggccttgctgctccacgccgccaggccggacatccagatgacccagagcttcagcagcctgagcgccagcgtgggcgacagagtgaccatcacctgtagagccagccaggacatcagcaactacctgaactggtatcagcagaagcccggcaaggcccccaagctgctgatctactacaccagcagactgcacagcggcgtgcccagcagattttctggcagcggctccggcaccgactacaccctgacaatcagctccctgcagcccgaggacttcgctacctacttctgtcagcaaggcaacaccctgccctggacctttggcggaggcaccaagctggaaatcaagagaggcggaggcggaagtggaggcggaggatctggcggcggaggctctgaagtgcaactggtgcagtccggcggagggctggtgcagagcggaggatctctgagactgagctgcagagccagcggctacaccttcacccggtactggatgctgtgggtgcgccagaggccaggcaagggactggaatgggtggccgagatcaacccccggaacgaccggaccaactacaacgagaagttcaagacccggttcaccatcagcgtggacagaagcaagaacaccctgtacctgcagatggacagcctgcgggccgaggataccgccgtgtacttttgtgctctgggaggcggctacgctatggactactggggccagggaacccttgtgaccgtgtcctctacgcgtgagcagaaactgatctcggaagaggatctggcgaagcccaccacgacgccagcgccgcgaccaccaacaccggcgcccaccatcgcgtcgcagcccctgtccctgcgcccagaggcgtgccggccagcggcggggggcgcagtgcacacgagggggctggacttcgcctgtgacatctacatctgggcgcccttggccgggacttgtggggtccttctcctgtcactggttatcaccctttactgcaaacggggcagaaagaaactcctgtatatattcaaacaaccatttatgagaccagtacaaactactcaagaggaagatggctgtagctgccgatttccagaagaagaagaaggaggatgtgaactgagagtgaagttcagcaggagcgcagacgcccccgcgtaccagcagggccagaaccagctctataacgagctgaatctaggacgaagagaggagtacgatgttttggacaagagacgtggccgggaccctgagatggggggaaagccgagaaggaagaaccctcaggaaggcctgtacaatgaactgcagaaagataagatggcggaggcctacagtgagattgggatgaaaggcgagcgccggaggggcaaggggcacgatggcctttaccagggtctcagtacagccaccaaggacacctacgacgcccttcacatgcaggccctgccccctcgctctagtggctccggcgagggcagaggaagtctactaacctgcggagatgtggaagaaaatcctggcccacatatgaccgagtacaagcccacggtgcgcctcgccacccgcgacgacgtccccagggccgtacgcaccctcgccgccgcgttcgccgactaccccgccacgcgccacaccgtcgatccggaccgccacatcgagcgggtcaccgagctgcaagaactcttcctcacgcgcgtcgggctcgacatcggcaaggtgtgggtcgcggacgacggcgccgcggtggcggtctggaccacgccggagagcgtcgaagcgggggcggtgttcgccgagatcggcccgcgcatggccgagttgagcggttcccggctggccgcgcagcaacagatggaaggcctcctggcgccgcaccggcccaaggagcccgcgtggttcctggccaccgtcggcgtctcgcccgaccaccagggcaagggtctgggcagcgccgtcgtgctccccggagtggaggcggccgagcgcgccggggtgcccgccttcctggagacctccgcgccccgcaacctccccttctacgagcggctcggcttcaccgtcaccgccgacgtcgaggtgcccgaaggaccgcgcacctggtgcatgacccgcaagcccggtgcctga

SEQ ID NO: 1648 - DNA, 2130 bp, Artificial Sequence
  Synthetic Polynucleotides
atggaaatgctccagggcctgctgctgctcctgctgctttctatgggcggagcttgggccagcagagagcctcttagaccttggtgtcaccccatcaacgccatcctggccgtggaaaaagagggctgccctgtctgcatcaccgtgaacaccacaatctgcgccggctactgccccaccatgatgagagtgctgcaagccgttctgcctcctctgcctcaggtcgtgtgcacctatcgggacgtccgcttcgagagcatcagactgcctggatgtcctagaggcgtggaccccgtggtgtcttttcctgtggctctgtcctgtagatgcggcccctgtagaagaagcaccagcgattgcggcggacccaaggatcaccctctgacatgcgatcacccacagctgagcggcctgttgtttcttggcggaggcggaagtggaggcggaggatctggcggcggaggctctgctcctgatgtgcaggattgccctgagtgcaccctgcaagagaaccccttcttctcccaacctggcgctcctatcctccagtgcatgggctgctgcttcagccgggcttatcccacacctctgcggagcaagaaaaccatgctggtccagaaaaacgtgaccagcgagagcacctgttgtgtggctaagagctacaacagagtgaccgtgatgggcggcttcaaggtggaaaatcacaccgcctgccactgctccacctgttactaccacaagagcacgcgtgagcagaaactgatctcggaagaggatctggcgaagcccaccacgacgccagcgccgcgaccaccaacaccggcgcccaccatcgcgtcgcagcccctgtccctgcgcccagaggcgtgccggccagcggcggggggcgcagtgcacacgagggggctggacttcgcctgtgacatctacatctgggcgcccttggccgggacttgtggggtccttctcctgtcactggttatcaccctttactgcaaacggggcagaaagaaactcctgtatatattcaaacaaccatttatgagaccagtacaaactactcaagaggaagatggctgtagctgccgatttccagaagaagaagaaggaggatgtgaactgagagtgaagttcagcaggagcgcagacgcccccgcgtaccagcagggccagaaccagctctataacgagctgaatctaggacgaagagaggagtacgatgttttggacaagagacgtggccgggaccctgagatggggggaaagccgagaaggaagaaccctcaggaaggcctgtacaatgaactgcagaaagataagatggcggaggcctacagtgagattgggatgaaaggcgagcgccggaggggcaaggggcacgatggcctttaccagggtctcagtacagccaccaaggacacctacgacgcccttcacatgcaggccctgccccctcgctctagtggctccggcgagggcagaggaagtctactaacctgcggagatgtggaagaaaatcctggcccacatatgaccgagtacaagcccacggtgcgcctcgccacccgcgacgacgtccccagggccgtacgcaccctcgccgccgcgttcgccgactaccccgccacgcgccacaccgtcgatccggaccgccacatcgagcgggtcaccgagctgcaagaactcttcctcacgcgcgtcgggctcgacatcggcaaggtgtgggtcgcggacgacggcgccgcggtggcggtctggaccacgccggagagcgtcgaagcgggggcggtgttcgccgagatcggcccgcgcatggccgagttgagcggttcccggctggccgcgcagcaacagatggaaggcctcctggcgccgcaccggcccaaggagcccgcgtggttcctggccaccgtcggcgtctcgcccgaccaccagggcaagggtctgggcagcgccgtcgtgctccccggagtggaggcggccgagcgcgccggggtgcccgccttcctggagacctccgcgccccgcaacctccccttctacgagcggctcggcttcaccgtcaccgccgacgtcgaggtgcccgaaggaccgcgcacctggtgcatgacccgcaagcccggtgcctga

SEQ ID NO: 1649 - DNA, 2172 bp, Artificial Sequence
  Synthetic Polynucleotides
atggccttaccagtgaccgccttgctcctgccgctggccttgctgctccacgccgccaggccggacatccagatgacacagtctccggcgtcactgtccgcctccgtgggggagactgtgactattatttgtagggcatcagttaacatctactcttatttggcctggtaccagcagaagcaaggcaagagtcctcagctgctggtgtataatgcgaagatcctggcagagggcgtgccgagccggttctccggcagcggctcaggtacccaattttccctcaagatcaattcactgcagccagaggactttggcagttactattgtcaacaccactacggcacattcactttcgggtccggtacaaaattggagattaagcgaggcggaggcggaagtggaggcggaggatctggcggcggaggctctcaggtacagttgaaagaaagcgggcctggactggtagcgccttcccaatctctctccatcacgtgcaccatctctggcttctccctgacttcctatggagttcactgggtgaggcagccccccggcaagggactggaatggctggtcgtcatctggtccgacgggtccacaacctacaactccgctctgaaaagtcggctctctatttctaaagataatagcaagagccaggtgtttctgaaaatgaactctctgcagaccgatgatacggccatttactactgcgcttcacactatggctcaaccttggcattcgcttcctggggccacggaacactggtgaccgtttccgcagccacgcgtgagcagaaactgatctcggaagaggatctggcgaagcccaccacgacgccagcgccgcgaccaccaacaccggcgcccaccatcgcgtcgcagcccctgtccctgcgcccagaggcgtgccggccagcggcggggggcgcagtgcacacgagggggctggacttcgcctgtgacatctacatctgggcgcccttggccgggacttgtggggtccttctcctgtcactggttatcaccctttactgcaaacggggcagaaagaaactcctgtatatattcaaacaaccatttatgagaccagtacaaactactcaagaggaagatggctgtagctgccgatttccagaagaagaagaaggaggatgtgaactgagagtgaagttcagcaggagcgcagacgcccccgcgtaccagcagggccagaaccagctctataacgagctgaatctaggacgaagagaggagtacgatgttttggacaagagacgtggccgggaccctgagatggggggaaagccgagaaggaagaaccctcaggaaggcctgtacaatgaactgcagaaagataagatggcggaggcctacagtgagattgggatgaaaggcgagcgccggaggggcaaggggcacgatggcctttaccagggtctcagtacagccaccaaggacacctacgacgcccttcacatgcaggccctgccccctcgctctagtggctccggcgagggcagaggaagtctactaacctgcggagatgtggaagaaaatcctggcccacatatgaccgagtacaagcccacggtgcgcctcgccacccgcgacgacgtccccagggccgtacgcaccctcgccgccgcgttcgccgactaccccgccacgcgccacaccgtcgatccggaccgccacatcgagcgggtcaccgagctgcaagaactcttcctcacgcgcgtcgggctcgacatcggcaaggtgtgggtcgcggacgacggcgccgcggtggcggtctggaccacgccggagagcgtcgaagcgggggcggtgttcgccgagatcggcccgcgcatggccgagttgagcggttcccggctggccgcgcagcaacagatggaaggcctcctggcgccgcaccggcccaaggagcccgcgtggttcctggccaccgtcggcgtctcgcccgaccaccagggcaagggtctgggcagcgccgtcgtgctccccggagtggaggcggccgagcgcgccggggtgcccgccttcctggagacctccgcgccccgcaacctccccttctacgagcggctcggcttcaccgtcaccgccgacgtcgaggtgcccgaaggaccgcgcacctggtgcatgacccgcaagcccggtgcctga

SEQ ID NO: 1650 - DNA, 2196 bp, Artificial Sequence
  Synthetic Polynucleotides
atggccttaccagtgaccgccttgctcctgccgctggccttgctgctccacgccgccaggccggacattgtgatgacccagtctcacaaattcatgtccacatcagtaggagacagggtcagcgtcacctgcaaggccagtcagaatgtgggtaataatgtagcctggtatcaacagaaaccagggcaatctcctaaagtactgatttactcggcatcctaccggtacagtggagtccctgatcgcttcacaggcagtggatctgggacagatttcactctcaccatcagtaatgtgcagtctgaagacttggcagagtatttctgtcagcaatataacacctatccattcacgttcggctcggggacaaagttggaaataaaaggcggaggcggaagtggaggcggaggatctggcggcggaggctctgaggtacagctggaggaaagcggtggaggactggtgcaacctggagggtctatgaagctctcttgcgtagcttctgggttcacgttctccaattactggatgaactgggtgcggcagtcccccgagaaaggcctggaatgggtagcagaaattcggttcaagtcccataactatgctacacactttgccgagtctgtcaaaggccggttcactattagtcgagacgacagcaagtcttcagtctacctgcagatgaataacttgcgggcagaggacacaggtatctactactgcaccaggagaatcggcaactccgactatgactggtggtactttgacgtctggggagcaggcaccagcgtgacggtgagttcagcctcaacgcgtgagcagaaactgatctcggaagaggatctggcgaagcccaccacgacgccagcgccgcgaccaccaacaccggcgcccaccatcgcgtcgcagcccctgtccctgcgcccagaggcgtgccggccagcggcggggggcgcagtgcacacgagggggctggacttcgcctgtgacatctacatctgggcgcccttggccgggacttgtggggtccttctcctgtcactggttatcaccctttactgcaaacggggcagaaagaaactcctgtatatattcaaacaaccatttatgagaccagtacaaactactcaagaggaagatggctgtagctgccgatttccagaagaagaagaaggaggatgtgaactgagagtgaagttcagcaggagcgcagacgcccccgcgtaccagcagggccagaaccagctctataacgagctgaatctaggacgaagagaggagtacgatgttttggacaagagacgtggccgggaccctgagatggggggaaagccgagaaggaagaaccctcaggaaggcctgtacaatgaactgcagaaagataagatggcggaggcctacagtgagattgggatgaaaggcgagcgccggaggggcaaggggcacgatggcctttaccagggtctcagtacagccaccaaggacacctacgacgcccttcacatgcaggccctgccccctcgctctagtggctccggcgagggcagaggaagtctactaacctgcggagatgtggaagaaaatcctggcccacatatgaccgagtacaagcccacggtgcgcctcgccacccgcgacgacgtccccagggccgtacgcaccctcgccgccgcgttcgccgactaccccgccacgcgccacaccgtcgatccggaccgccacatcgagcgggtcaccgagctgcaagaactcttcctcacgcgcgtcgggctcgacatcggcaaggtgtgggtcgcggacgacggcgccgcggtggcggtctggaccacgccggagagcgtcgaagcgggggcggtgttcgccgagatcggcccgcgcatggccgagttgagcggttcccggctggccgcgcagcaacagatggaaggcctcctggcgccgcaccggcccaaggagcccgcgtggttcctggccaccgtcggcgtctcgcccgaccaccagggcaagggtctgggcagcgccgtcgtgctccccggagtggaggcggccgagcgcgccggggtgcccgccttcctggagacctccgcgccccgcaacctccccttctacgagcggctcggcttcaccgtcaccgccgacgtcgaggtgcccgaaggaccgcgcacctggtgcatgacccgcaagcccggtgcctga

SEQ ID NO: 1651 - DNA, 2184 bp, Artificial Sequence; identical to SEQ ID NO: 1536
  Synthetic Polynucleotides

SEQ ID NO: 1652 - DNA, 2202 bp, Artificial Sequence
  Synthetic Polynucleotides
atggccttaccagtgaccgccttgctcctgccgctggccttgctgctccacgccgccaggccggaccagagcgtgctgacacagcctccatccgtgtctggcgctccaggccagagagtgaccatctcctgtaccggcagcagcagcaacatcggagccggctatgacgtgcactggtatcagcaactgcccggcaccgcccccaagctgctgatctacggcaacagcaacagacccagcggcgtgcccgatagattcagcggcagcaagagcggcacaagcgccagcctggctatcactggactccaggccgaggacgaggccgactactactgccagagctacgacaacagcctgtcctcctgggtgttcggcggaggcaccaagctgacagtgctgggccagcctaagggcggaggcggaagtggaggcggaggatctggcggcggaggctctgaagtgcaactccagcagagcggagccgaagtgaagaaacccggcagctccgtgaaggtgtcctgcaaggcttccggcggcaccttcagcagctacgccatttcttgggtgcgccaggcccctggacagggcctggaatggatgggcagaatcatccccatcctgggaatcgccaactacgcccagaaattccagggccgcgtgaccatcaccgccgacaagagcacaagcaccgcctacatggaactgagcagcctgcggagcgaggacaccgccgtgtactactgcgccagagatgtgggcagcggctcctacagcctggactattggggccagggcaccctcgtgaccgtgtctagtacgcgtgagcagaaactgatctcggaagaggatctggcgaagcccaccacgacgccagcgccgcgaccaccaacaccggcgcccaccatcgcgtcgcagcccctgtccctgcgcccagaggcgtgccggccagcggcggggggcgcagtgcacacgagggggctggacttcgcctgtgacatctacatctgggcgcccttggccgggacttgtggggtccttctcctgtcactggttatcaccctttactgcaaacggggcagaaagaaactcctgtatatattcaaacaaccatttatgagaccagtacaaactactcaagaggaagatggctgtagctgccgatttccagaagaagaagaaggaggatgtgaactgagagtgaagttcagcaggagcgcagacgcccccgcgtaccagcagggccagaaccagctctataacgagctgaatctaggacgaagagaggagtacgatgttttggacaagagacgtggccgggaccctgagatggggggaaagccgagaaggaagaaccctcaggaaggcctgtacaatgaactgcagaaagataagatggcggaggcctacagtgagattgggatgaaaggcgagcgccggaggggcaaggggcacgatggcctttaccagggtctcagtacagccaccaaggacacctacgacgcccttcacatgcaggccctgccccctcgctctagtggctccggcgagggcagaggaagtctactaacctgcggagatgtggaagaaaatcctggcccacatatgaccgagtacaagcccacggtgcgcctcgccacccgcgacgacgtccccagggccgtacgcaccctcgccgccgcgttcgccgactaccccgccacgcgccacaccgtcgatccggaccgccacatcgagcgggtcaccgagctgcaagaactcttcctcacgcgcgtcgggctcgacatcggcaaggtgtgggtcgcggacgacggcgccgcggtggcggtctggaccacgccggagagcgtcgaagcgggggcggtgttcgccgagatcggcccgcgcatggccgagttgagcggttcccggctggccgcgcagcaacagatggaaggcctcctggcgccgcaccggcccaaggagcccgcgtggttcctggccaccgtcggcgtctcgcccgaccaccagggcaagggtctgggcagcgccgtcgtgctccccggagtggaggcggccgagcgcgccggggtgcccgccttcctggagacctccgcgccccgcaacctccccttctacgagcggctcggcttcaccgtcaccgccgacgtcgaggtgcccgaaggaccgcgcacctggtgcatgacccgcaagcccggtgcctga

SEQ ID NO: 1653 - DNA, 2193 bp, Artificial Sequence
  Synthetic Polynucleotides
atggccttaccagtgaccgccttgctcctgccgctggccttgctgctccacgccgccaggccggaccagagcgtcgtgacacagcctccatctgtgtctgccgcccctggccggaaagtgaccatctcttgtagcggcagcagcagcaacatcggcagcaactacgtgtcctggtatcagcaggtgcccggcaccgcccctaagctgctgatctacgaggacgacaagcggcccagcggcatccccgatagattcagcggctctaagagcggcaccagcgccacactgggcatcaccggactccagacaggcgacgaggccgactacttctgcgccacctgggacagaaccgtgaacgtggtgcgctttggcggcggaaccagactgacagtgcacagccagcctaagggcggaggcggaagtggaggcggaggatctggcggcggaggctctcaactccaactccaggaaagcggccctggcctcgtgaagcctagcgagacactgagcctgacctgcaccgtgtctggcggcagcatctccagcagctcctactactggggctggatcagacagccccctggcaagggcctggaatggatcggctccatctactacagcggaagcacctactacaaccccagcctgaagtcccgcgtgaccatcagcgtggacaccagcaagaaccagttctccctgaagctgagcagcgtgacagccgccgataccgccgtgtactactgtgccagacatgtgggccacgagctggattactggggccagggcacactcgtgaccgtgtctagtacgcgtgagcagaaactgatctcggaagaggatctggcgaagcccaccacgacgccagcgccgcgaccaccaacaccggcgcccaccatcgcgtcgcagcccctgtccctgcgcccagaggcgtgccggccagcggcggggggcgcagtgcacacgagggggctggacttcgcctgtgacatctacatctgggcgcccttggccgggacttgtggggtccttctcctgtcactggttatcaccctttactgcaaacggggcagaaagaaactcctgtatatattcaaacaaccatttatgagaccagtacaaactactcaagaggaagatggctgtagctgccgatttccagaagaagaagaaggaggatgtgaactgagagtgaagttcagcaggagcgcagacgcccccgcgtaccagcagggccagaaccagctctataacgagctgaatctaggacgaagagaggagtacgatgttttggacaagagacgtggccgggaccctgagatggggggaaagccgagaaggaagaaccctcaggaaggcctgtacaatgaactgcagaaagataagatggcggaggcctacagtgagattgggatgaaaggcgagcgccggaggggcaaggggcacgatggcctttaccagggtctcagtacagccaccaaggacacctacgacgcccttcacatgcaggccctgccccctcgctctagtggctccggcgagggcagaggaagtctactaacctgcggagatgtggaagaaaatcctggcccacatatgaccgagtacaagcccacggtgcgcctcgccacccgcgacgacgtccccagggccgtacgcaccctcgccgccgcgttcgccgactaccccgccacgcgccacaccgtcgatccggaccgccacatcgagcgggtcaccgagctgcaagaactcttcctcacgcgcgtcgggctcgacatcggcaaggtgtgggtcgcggacgacggcgccgcggtggcggtctggaccacgccggagagcgtcgaagcgggggcggtgttcgccgagatcggcccgcgcatggccgagttgagcggttcccggctggccgcgcagcaacagatggaaggcctcctggcgccgcaccggcccaaggagcccgcgtggttcctggccaccgtcggcgtctcgcccgaccaccagggcaagggtctgggcagcgccgtcgtgctccccggagtggaggcggccgagcgcgccggggtgcccgccttcctggagacctccgcgccccgcaacctccccttctacgagcggctcggcttcaccgtcaccgccgacgtcgaggtgcccgaaggaccgcgcacctggtgcatgacccgcaagcccggtgcctga

SEQ ID NO: 1654 - DNA, 2175 bp, Artificial Sequence
  Synthetic Polynucleotides
atggccttaccagtgaccgccttgctcctgccgctggccttgctgctccacgccgccaggccggacatccagatgacccagagccccagcagcctgtctgccagcgtgggcgacagagtgaccatcacctgtagagccagccagagcatcagcagctacctgaactggtatcagcagaagcccggcaaggcccccaaactgctgatctacgccgccagctctctgcagtctggcgtgccatctggctttagcggcagcggctctggcaccgacttcaccctgaccatcagctccctgcagcccgaggacttcgccacctactactgccagcagagctacagcacccccctgacctttggcggaggcaccaaggtggaaatcaagagaggcggcggaggctcaggcggaggcggatctggcgggggaggatctcaggtgcaactgcaggaatctggccctggcctcgtgaagcccagcgagacactgagcctgacctgtaccgtgtctggcggctctgtgtccagcggcagctactactggtcctggatcagacagccccctggcaagggcctggaatggatcggctacatctactacagcggctccaccaactacaaccccagcctgaagtcccgcgtgaccatctccgtggacaccagcaagaaccagttctccctgaagctgagcagcgtgacagccgccgataccgccgtgtactactgtgccagagagggcaagaacggggccttcgacatctggggccagggcacaatggtcaccgtgtcctctacgcgtgagcagaaactgatctcggaagaggatctggcgaagcccaccacgacgccagcgccgcgaccaccaacaccggcgcccaccatcgcgtcgcagcccctgtccctgcgcccagaggcgtgccggccagcggcggggggcgcagtgcacacgagggggctggacttcgcctgtgacatctacatctgggcgcccttggccgggacttgtggggtccttctcctgtcactggttatcaccctttactgcaaacggggcagaaagaaactcctgtatatattcaaacaaccatttatgagaccagtacaaactactcaagaggaagatggctgtagctgccgatttccagaagaagaagaaggaggatgtgaactgagagtgaagttcagcaggagcgcagacgcccccgcgtaccagcagggccagaaccagctctataacgagctgaatctaggacgaagagaggagtacgatgttttggacaagagacgtggccgggaccctgagatggggggaaagccgagaaggaagaaccctcaggaaggcctgtacaatgaactgcagaaagataagatggcggaggcctacagtgagattgggatgaaaggcgagcgccggaggggcaaggggcacgatggcctttaccagggtctcagtacagccaccaaggacacctacgacgcccttcacatgcaggccctgccccctcgctctagtggctccggcgagggcagaggaagtctactaacctgcggagatgtggaagaaaatcctggcccacatatgaccgagtacaagcccacggtgcgcctcgccacccgcgacgacgtccccagggccgtacgcaccctcgccgccgcgttcgccgactaccccgccacgcgccacaccgtcgatccggaccgccacatcgagcgggtcaccgagctgcaagaactcttcctcacgcgcgtcgggctcgacatcggcaaggtgtgggtcgcggacgacggcgccgcggtggcggtctggaccacgccggagagcgtcgaagcgggggcggtgttcgccgagatcggcccgcgcatggccgagttgagcggttcccggctggccgcgcagcaacagatggaaggcctcctggcgccgcaccggcccaaggagcccgcgtggttcctggccaccgtcggcgtctcgcccgaccaccagggcaagggtctgggcagcgccgtcgtgctccccggagtggaggcggccgagcgcgccggggtgcccgccttcctggagacctccgcgccccgcaacctccccttctacgagcggctcggcttcaccgtcaccgccgacgtcgaggtgcccgaaggaccgcgcacctggtgcatgacccgcaagcccggtgcctga

SEQ ID NO: 1655 - DNA, 1833 bp, Artificial Sequence
  Synthetic Polynucleotides
atggccctgcccgtgacagccctgctgctgcctctggctctgctgctgcacgccgccagacccgatgaattcgatgttcagttggtggagtctggtggcggtttggtgcagccaggtggctccctgcgactcagttgtgcagcctccgggttcattctggattactacgctattggttggtttcgacaggcccccggaaaggagagagagggcgtgctctgcattgatgccagcgacgacattacctactacgccgattctgtgaagggccgcttcaccatcagtagagacaatagcaagaatacagtctacctgcagatgaactccctgcgcccagaagacactgccgtctactactgtgctacccctatcgggctttcttcctcttgccttctcgaatatgactacgattactgggggcaggggacgctggtcaccgtgtctagcacgcgtgagcagaaactgatctcggaagaggatctggcgaagcccaccacgacgccagcgccgcgaccaccaacaccggcgcccaccatcgcgtcgcagcccctgtccctgcgcccagaggcgtgccggccagcggcggggggcgcagtgcacacgagggggctggacttcgcctgtgacatctacatctgggcgcccttggccgggacttgtggggtccttctcctgtcactggttatcaccctttactgcaaacggggcagaaagaaactcctgtatatattcaaacaaccatttatgagaccagtacaaactactcaagaggaagatggctgtagctgccgatttccagaagaagaagaaggaggatgtgaactgagagtgaagttcagcaggagcgcagacgcccccgcgtaccagcagggccagaaccagctctataacgagctgaatctaggacgaagagaggagtacgatgttttggacaagagacgtggccgggaccctgagatggggggaaagccgagaaggaagaaccctcaggaaggcctgtacaatgaactgcagaaagataagatggcggaggcctacagtgagattgggatgaaaggcgagcgccggaggggcaaggggcacgatggcctttaccagggtctcagtacagccaccaaggacacctacgacgcccttcacatgcaggccctgccccctcgctctagtggctccggcgagggcagaggaagtctactaacctgcggagatgtggaagaaaatcctggcccacatatgaccgagtacaagcccacggtgcgcctcgccacccgcgacgacgtccccagggccgtacgcaccctcgccgccgcgttcgccgactaccccgccacgcgccacaccgtcgatccggaccgccacatcgagcgggtcaccgagctgcaagaactcttcctcacgcgcgtcgggctcgacatcggcaaggtgtgggtcgcggacgacggcgccgcggtggcggtctggaccacgccggagagcgtcgaagcgggggcggtgttcgccgagatcggcccgcgcatggccgagttgagcggttcccggctggccgcgcagcaacagatggaaggcctcctggcgccgcaccggcccaaggagcccgcgtggttcctggccaccgtcggcgtctcgcccgaccaccagggcaagggtctgggcagcgccgtcgtgctccccggagtggaggcggccgagcgcgccggggtgcccgccttcctggagacctccgcgccccgcaacctccccttctacgagcggctcggcttcaccgtcaccgccgacgtcgaggtgcccgaaggaccgcgcacctggtgcatgacccgcaagcccggtgcctga

SEQ ID NO: 1656 - DNA, 2322 bp, Artificial Sequence
  Synthetic Polynucleotides
atggccctgcccgtgacagccctgctgctgcctctggctctgctgctgcacgccgccagacccgatgaattcgatgttcagttggtggagtctggtggcggtttggtgcagccaggtggctccctgcgactcagttgtgcagcctccgggttcattctggattactacgctattggttggtttcgacaggcccccggaaaggagagagagggcgtgctctgcattgatgccagcgacgacattacctactacgccgattctgtgaagggccgcttcaccatcagtagagacaatagcaagaatacagtctacctgcagatgaactccctgcgcccagaagacactgccgtctactactgtgctacccctatcgggctttcttcctcttgccttctcgaatatgactacgattactgggggcaggggacgctggtcaccgtgtctagcctcgagggaggtagcggctccgggggaggcggaagtggaggcggaggatctgggtctggaggaagcggatctggaggctcagggtcagggggctcaggcagtggaggctctttcgaagtgcaactggtggagtccggcggtggactggtacagcctgggggttcactgcgcctgtcctgcgccgccagcggaagaacctattacctcaatgctatgggttggttccgccaggccccaggaaaggagcgcgagttcgtggcggctattgactggtccgaggggaacaaggactatgctgattccgtgaagggcaggtttaccatcagccgggataattcaaaaaatactgtttatttgcagatgaactctcttagaccagaagacactgctgtctattactgcgccgctgacacccctccttggggaccactgatttatatcgaaagctatgattcctgggggcagggcacactcgtcaccgtgagtagcacgcgtgagcagaaactgatctcggaagaggatctggcgaagcccaccacgacgccagcgccgcgaccaccaacaccggcgcccaccatcgcgtcgcagcccctgtccctgcgcccagaggcgtgccggccagcggcggggggcgcagtgcacacgagggggctggacttcgcctgtgacatctacatctgggcgcccttggccgggacttgtggggtccttctcctgtcactggttatcaccctttactgcaaacggggcagaaagaaactcctgtatatattcaaacaaccatttatgagaccagtacaaactactcaagaggaagatggctgtagctgccgatttccagaagaagaagaaggaggatgtgaactgagagtgaagttcagcaggagcgcagacgcccccgcgtaccagcagggccagaaccagctctataacgagctgaatctaggacgaagagaggagtacgatgttttggacaagagacgtggccgggaccctgagatggggggaaagccgagaaggaagaaccctcaggaaggcctgtacaatgaactgcagaaagataagatggcggaggcctacagtgagattgggatgaaaggcgagcgccggaggggcaaggggcacgatggcctttaccagggtctcagtacagccaccaaggacacctacgacgcccttcacatgcaggccctgccccctcgctctagtggctccggcgagggcagaggaagtctactaacctgcggagatgtggaagaaaatcctggcccacatatgaccgagtacaagcccacggtgcgcctcgccacccgcgacgacgtccccagggccgtacgcaccctcgccgccgcgttcgccgactaccccgccacgcgccacaccgtcgatccggaccgccacatcgagcgggtcaccgagctgcaagaactcttcctcacgcgcgtcgggctcgacatcggcaaggtgtgggtcgcggacgacggcgccgcggtggcggtctggaccacgccggagagcgtcgaagcgggggcggtgttcgccgagatcggcccgcgcatggccgagttgagcggttcccggctggccgcgcagcaacagatggaaggcctcctggcgccgcaccggcccaaggagcccgcgtggttcctggccaccgtcggcgtctcgcccgaccaccagggcaagggtctgggcagcgccgtcgtgctccccggagtggaggcggccgagcgcgccggggtgcccgccttcctggagacctccgcgccccgcaacctccccttctacgagcggctcggcttcaccgtcaccgccgacgtcgaggtgcccgaaggaccgcgcacctggtgcatgacccgcaagcccggtgcctga

SEQ ID NO: 1657 - DNA, 2175 bp, Artificial Sequence
  Synthetic Polynucleotides
atggccttaccagtgaccgccttgctcctgccgctggccttgctgctccacgccgccaggccggaccagatcgtgctgacccagtcccccgctattatgtccgcatcaccgggcgaaaaagtgacgatctcctgtagcgcttcatctagcgtctcctacatgtattggtatcaacagaaacctgggtctagcccaaagccgtggatctacagaaccagtaaccttgccagtggggtgccagcccgcttcagcggtagtggcagtggaacttcctatagcctcacaataagcaacatggaggctgaagatgccgctgcctattactgccagcagtaccacagttacccaaccacgttcggcgggggaactaagctcgaagtaaaaggcggaggcggaagtggaggcggaggatctggcggcggaggctctgaggtgcagctggtggaatctgggggcggcctggtccaacctaagggatcactcaagctctcttgtgcggccagcggattctctttcaatacctatgctatgaattgggtgagacaggcgcccggaaagggcctcgaatggatagcccatatccggtcaaaatcaaacaatttcgcaacctactatgcggactccgtgaaggaccgattttccatctcccgagatgcctccgagaatattctgttcctgcagatgaataacctcaagacagaggacaccgccatgtactactgtgtgcgccagggcggtgactttcccatggattactgggggcaggggaccagcgtgaccgtgagctctacgcgtgagcagaaactgatctcggaagaggatctggcgaagcccaccacgacgccagcgccgcgaccaccaacaccggcgcccaccatcgcgtcgcagcccctgtccctgcgcccagaggcgtgccggccagcggcggggggcgcagtgcacacgagggggctggacttcgcctgtgacatctacatctgggcgcccttggccgggacttgtggggtccttctcctgtcactggttatcaccctttactgcaaacggggcagaaagaaactcctgtatatattcaaacaaccatttatgagaccagtacaaactactcaagaggaagatggctgtagctgccgatttccagaagaagaagaaggaggatgtgaactgagagtgaagttcagcaggagcgcagacgcccccgcgtaccagcagggccagaaccagctctataacgagctgaatctaggacgaagagaggagtacgatgttttggacaagagacgtggccgggaccctgagatggggggaaagccgagaaggaagaaccctcaggaaggcctgtacaatgaactgcagaaagataagatggcggaggcctacagtgagattgggatgaaaggcgagcgccggaggggcaaggggcacgatggcctttaccagggtctcagtacagccaccaaggacacctacgacgcccttcacatgcaggccctgccccctcgctctagtggctccggcgagggcagaggaagtctactaacctgcggagatgtggaagaaaatcctggcccacatatgaccgagtacaagcccacggtgcgcctcgccacccgcgacgacgtccccagggccgtacgcaccctcgccgccgcgttcgccgactaccccgccacgcgccacaccgtcgatccggaccgccacatcgagcgggtcaccgagctgcaagaactcttcctcacgcgcgtcgggctcgacatcggcaaggtgtgggtcgcggacgacggcgccgcggtggcggtctggaccacgccggagagcgtcgaagcgggggcggtgttcgccgagatcggcccgcgcatggccgagttgagcggttcccggctggccgcgcagcaacagatggaaggcctcctggcgccgcaccggcccaaggagcccgcgtggttcctggccaccgtcggcgtctcgcccgaccaccagggcaagggtctgggcagcgccgtcgtgctccccggagtggaggcggccgagcgcgccggggtgcccgccttcctggagacctccgcgccccgcaacctccccttctacgagcggctcggcttcaccgtcaccgccgacgtcgaggtgcccgaaggaccgcgcacctggtgcatgacccgcaagcccggtgcctga

SEQ ID NO: 1658 - DNA, 2172 bp, Artificial Sequence
  Synthetic Polynucleotides
atggccttaccagtgaccgccttgctcctgccgctggccttgctgctccacgccgccaggccggacgacatccagatgacccagagcagcagcagcttcagcgtgagcctgggcgacagagtgaccatcacctgcatggccagcgaggacatctacatcagactggcctggtaccagcagaagcccggcaacgcccccagactgctgatcagcgccgccaccagcctggagaccggcgtgcccagcagattcagcggcagcggcagcggcaaggactacaccctgagcatcaccagcctgcagaccgaggacgtgggcacctactactgccagcagtactggagcagcccctggaccttcggcggcggcaccaagctggagatcaacggcggaggcggaagtggaggcggaggatctggcggcggaggctctgacgtgcagctgcaggagagcggccccggcctggtgaagcccagccagagcctgagcctgacctgcaccgtgaccggctacagcatcaccagcgactacacctggaactggatcagacagttccccggcaacaagctggagtggatgggctacatcacctacagcggcagcaccagctacaaccccagcctgaagagcagaaacagcatcaccagagacaccagcaagaaccagttcttcctgcagctgaacagcgtgaccaccgaggacaccgccacctactactgcgccagactgggcagaagatacacaatggactactggggccagggcaccagcgtgaccgtgagcagcacgcgtgagcagaaactgatctcggaagaggatctggcgaagcccaccacgacgccagcgccgcgaccaccaacaccggcgcccaccatcgcgtcgcagcccctgtccctgcgcccagaggcgtgccggccagcggcggggggcgcagtgcacacgagggggctggacttcgcctgtgacatctacatctgggcgcccttggccgggacttgtggggtccttctcctgtcactggttatcaccctttactgcaaacggggcagaaagaaactcctgtatatattcaaacaaccatttatgagaccagtacaaactactcaagaggaagatggctgtagctgccgatttccagaagaagaagaaggaggatgtgaactgagagtgaagttcagcaggagcgcagacgcccccgcgtaccagcagggccagaaccagctctataacgagctgaatctaggacgaagagaggagtacgatgttttggacaagagacgtggccgggaccctgagatggggggaaagccgagaaggaagaaccctcaggaaggcctgtacaatgaactgcagaaagataagatggcggaggcctacagtgagattgggatgaaaggcgagcgccggaggggcaaggggcacgatggcctttaccagggtctcagtacagccaccaaggacacctacgacgcccttcacatgcaggccctgccccctcgctctagtggctccggcgagggcagaggaagtctactaacctgcggagatgtggaagaaaatcctggcccacatatgaccgagtacaagcccacggtgcgcctcgccacccgcgacgacgtccccagggccgtacgcaccctcgccgccgcgttcgccgactaccccgccacgcgccacaccgtcgatccggaccgccacatcgagcgggtcaccgagctgcaagaactcttcctcacgcgcgtcgggctcgacatcggcaaggtgtgggtcgcggacgacggcgccgcggtggcggtctggaccacgccggagagcgtcgaagcgggggcggtgttcgccgagatcggcccgcgcatggccgagttgagcggttcccggctggccgcgcagcaacagatggaaggcctcctggcgccgcaccggcccaaggagcccgcgtggttcctggccaccgtcggcgtctcgcccgaccaccagggcaagggtctgggcagcgccgtcgtgctccccggagtggaggcggccgagcgcgccggggtgcccgccttcctggagacctccgcgccccgcaacctccccttctacgagcggctcggcttcaccgtcaccgccgacgtcgaggtgcccgaaggaccgcgcacctggtgcatgacccgcaagcccggtgcctga

SEQ ID NO: 1659 - DNA, 2169 bp, Artificial Sequence
  Synthetic Polynucleotides
atggccctgcctgtgacagctctgctgctgcctctggcactgctgctgcacgccgccagacctgatgtgcagctccaggaaagcggccctggcctcgtgaagcctagccagagcctgagcctgacatgcaccgtgaccggctacagcatcaccagcgactacacctggaactggatcagacagttccccggcaacaagctggaatggatgggctacatcacctacagcggcagcaccagctacaaccccagcctgaagtcccggaactccatcaccagagacaccagcaagaaccagttcttcttgcagctgaacagcgtgaccaccgaggacaccgccacctactactgcgccagactgggcagacggtacaccatggactattggggccagggcacctccgtgaccgtgtctagcggaggcggaggaagtggcggcggaggatctgggggaggcggaagcgatatccagatgacccagtccagcagcagcttcagcgtgtccctgggcgacagagtgaccatcacctgtatggcctccgaggacatctacatccggctggcctggtatcagcagaagcccggcaacgcccccagactgctgattagcgccgccacctctctggaaaccggcgtgccaagcagattcagcggctctggcagcggcaaggactacaccctgagcatcacctccttgcagaccgaggacgtgggcacctactattgccagcagtattggagcagcccctggacctttggcggaggcacaaagctggaaatcaacacgcgtgagcagaaactgatctcggaagaggatctggcgaagcccaccacgacgccagcgccgcgaccaccaacaccggcgcccaccatcgcgtcgcagcccctgtccctgcgcccagaggcgtgccggccagcggcggggggcgcagtgcacacgagggggctggacttcgcctgtgacatctacatctgggcgcccttggccgggacttgtggggtccttctcctgtcactggttatcaccctttactgcaaacggggcagaaagaaactcctgtatatattcaaacaaccatttatgagaccagtacaaactactcaagaggaagatggctgtagctgccgatttccagaagaagaagaaggaggatgtgaactgagagtgaagttcagcaggagcgcagacgcccccgcgtaccagcagggccagaaccagctctataacgagctgaatctaggacgaagagaggagtacgatgttttggacaagagacgtggccgggaccctgagatggggggaaagccgagaaggaagaaccctcaggaaggcctgtacaatgaactgcagaaagataagatggcggaggcctacagtgagattgggatgaaaggcgagcgccggaggggcaaggggcacgatggcctttaccagggtctcagtacagccaccaaggacacctacgacgcccttcacatgcaggccctgccccctcgctctagtggctccggcgagggcagaggaagtctactaacctgcggagatgtggaagaaaatcctggcccacatatgaccgagtacaagcccacggtgcgcctcgccacccgcgacgacgtccccagggccgtacgcaccctcgccgccgcgttcgccgactaccccgccacgcgccacaccgtcgatccggaccgccacatcgagcgggtcaccgagctgcaagaactcttcctcacgcgcgtcgggctcgacatcggcaaggtgtgggtcgcggacgacggcgccgcggtggcggtctggaccacgccggagagcgtcgaagcgggggcggtgttcgccgagatcggcccgcgcatggccgagttgagcggttcccggctggccgcgcagcaacagatggaaggcctcctggcgccgcaccggcccaaggagcccgcgtggttcctggccaccgtcggcgtctcgcccgaccaccagggcaagggtctgggcagcgccgtcgtgctccccggagtggaggcggccgagcgcgccggggtgcccgccttcctggagacctccgcgccccgcaacctccccttctacgagcggctcggcttcaccgtcaccgccgacgtcgaggtgcccgaaggaccgcgcacctggtgcatgacccgcaagcccggtgcctga

SEQ ID NO: 1660 - DNA, 2172 bp, Artificial Sequence
  Synthetic Polynucleotides
atggccctgcctgtgacagctctgctgctgcctctggcactgctgctgcacgccgccagacctgacatccagatgacccagagcagcagcagcttcagcgtgtccctgggcgacagagtgaccatcacatgcaaggccagcgaggacatctacatccggctggcctggtatcagcagaagcccggcaacgcccccagactgctgattagcgccgccacctctctggaaaccggcatccccagcagattctccggctctggcagcggcgaggactacaccctgacaatcaccagcctccagaccgaggacgtggcaacctactactgccagcagtattggaccaccccctggacctttggcggaggcaccaagctggaaatcaagagaggcggaggcggaagtggaggcggaggatctggcggcggaggctctgatgtgcagctccaggaatctggccccggactcgtgaagcctagccagagcctgagcctgacatgcaccgtgaccggctacagcatcaccatcgactacacctggaactggatcagacagttccccggcaacaaactggaatggatgggctacatcacctacagcggcagcaccgactacaaccccagcctgaagtccagaagctccatcaccagagacacctctatgaaccagttcttcttgcagctgaacagcgtgaccaccgaggacaccgccacctactattgcgccagactgggcagaagatacgccctggactattggggccagggcaccagcgtgacagtgtcctctacgcgtgagcagaaactgatctcggaagaggatctggcgaagcccaccacgacgccagcgccgcgaccaccaacaccggcgcccaccatcgcgtcgcagcccctgtccctgcgcccagaggcgtgccggccagcggcggggggcgcagtgcacacgagggggctggacttcgcctgtgacatctacatctgggcgcccttggccgggacttgtggggtccttctcctgtcactggttatcaccctttactgcaaacggggcagaaagaaactcctgtatatattcaaacaaccatttatgagaccagtacaaactactcaagaggaagatggctgtagctgccgatttccagaagaagaagaaggaggatgtgaactgagagtgaagttcagcaggagcgcagacgcccccgcgtaccagcagggccagaaccagctctataacgagctgaatctaggacgaagagaggagtacgatgttttggacaagagacgtggccgggaccctgagatggggggaaagccgagaaggaagaaccctcaggaaggcctgtacaatgaactgcagaaagataagatggcggaggcctacagtgagattgggatgaaaggcgagcgccggaggggcaaggggcacgatggcctttaccagggtctcagtacagccaccaaggacacctacgacgcccttcacatgcaggccctgccccctcgctctagtggctccggcgagggcagaggaagtctactaacctgcggagatgtggaagaaaatcctggcccacatatgaccgagtacaagcccacggtgcgcctcgccacccgcgacgacgtccccagggccgtacgcaccctcgccgccgcgttcgccgactaccccgccacgcgccacaccgtcgatccggaccgccacatcgagcgggtcaccgagctgcaagaactcttcctcacgcgcgtcgggctcgacatcggcaaggtgtgggtcgcggacgacggcgccgcggtggcggtctggaccacgccggagagcgtcgaagcgggggcggtgttcgccgagatcggcccgcgcatggccgagttgagcggttcccggctggccgcgcagcaacagatggaaggcctcctggcgccgcaccggcccaaggagcccgcgtggttcctggccaccgtcggcgtctcgcccgaccaccagggcaagggtctgggcagcgccgtcgtgctccccggagtggaggcggccgagcgcgccggggtgcccgccttcctggagacctccgcgccccgcaacctccccttctacgagcggctcggcttcaccgtcaccgccgacgtcgaggtgcccgaaggaccgcgcacctggtgcatgacccgcaagcccggtgcctga

SEQ ID NO: 1661 - DNA, 2175 bp, Artificial Sequence
  Synthetic Polynucleotides
atggccttaccagtgaccgccttgctcctgccgctggccttgctgctccacgccgccaggccggacatcgtaatgacccaggctgccccatccataccagtcactcccggtgaatccgtgtctatatcttgtaggtccgataagagtctgcttcacagcaacggcaatacttatcttttctggtttttgcagcgaccgggacaaagcccacaactgctgatctatagaatgtcaaatcttgcatcaggggtcccagatcgctttagtggatctgggtcaggcacagctttcaccctgagaatctccggagtggaagcagaagacgtaggcgtgtattactgtatgcagcaccttgagtatccttatacctttggaggcggaactaagctcgaaattaaaggcggaggcggaagtggaggcggaggatctggcggcggaggctctcaggttcaactgcagcagtctggacctgaactggtgaagcctggggcctcagtgaagatgtcctgcaaggcttctggctacgcattcagtagttcctggttgaactgggtgaggcagaggcctggaaagggtcttgagtggattggacggatttatcctggagatggagaaaatcactataatgggaaattcaagggcaaggccacactgactgcagacaaatcctccagcacaggctacatgcaactcagcagcctgacgtctgaggactctgcggtctacttctgtgcaagttattatgaagggggttattggggccaagggactctaatcactgtctctgcaacgcgtgagcagaaactgatctcggaagaggatctggcgaagcccaccacgacgccagcgccgcgaccaccaacaccggcgcccaccatcgcgtcgcagcccctgtccctgcgcccagaggcgtgccggccagcggcggggggcgcagtgcacacgagggggctggacttcgcctgtgacatctacatctgggcgcccttggccgggacttgtggggtccttctcctgtcactggttatcaccctttactgcaaacggggcagaaagaaactcctgtatatattcaaacaaccatttatgagaccagtacaaactactcaagaggaagatggctgtagctgccgatttccagaagaagaagaaggaggatgtgaactgagagtgaagttcagcaggagcgcagacgcccccgcgtaccagcagggccagaaccagctctataacgagctgaatctaggacgaagagaggagtacgatgttttggacaagagacgtggccgggaccctgagatggggggaaagccgagaaggaagaaccctcaggaaggcctgtacaatgaactgcagaaagataagatggcggaggcctacagtgagattgggatgaaaggcgagcgccggaggggcaaggggcacgatggcctttaccagggtctcagtacagccaccaaggacacctacgacgcccttcacatgcaggccctgccccctcgctctagtggctccggcgagggcagaggaagtctactaacctgcggagatgtggaagaaaatcctggcccacatatgaccgagtacaagcccacggtgcgcctcgccacccgcgacgacgtccccagggccgtacgcaccctcgccgccgcgttcgccgactaccccgccacgcgccacaccgtcgatccggaccgccacatcgagcgggtcaccgagctgcaagaactcttcctcacgcgcgtcgggctcgacatcggcaaggtgtgggtcgcggacgacggcgccgcggtggcggtctggaccacgccggagagcgtcgaagcgggggcggtgttcgccgagatcggcccgcgcatggccgagttgagcggttcccggctggccgcgcagcaacagatggaaggcctcctggcgccgcaccggcccaaggagcccgcgtggttcctggccaccgtcggcgtctcgcccgaccaccagggcaagggtctgggcagcgccgtcgtgctccccggagtggaggcggccgagcgcgccggggtgcccgccttcctggagacctccgcgccccgcaacctccccttctacgagcggctcggcttcaccgtcaccgccgacgtcgaggtgcccgaaggaccgcgcacctggtgcatgacccgcaagcccggtgcctga

SEQ ID NO: 1662 - DNA, 2172 bp, Artificial Sequence
  Synthetic Polynucleotides
atggccttaccagtgaccgccttgctcctgccgctggccttgctgctccacgccgccaggccggacatcgtactgacacagagccccgcttctctggcagtgtcactgggccagtccgttacaatatcctgtcgggcgagtgaatccgtggaatactatggaacaagtctcatgcagtggtatcagcagaaacctggacagccccccaagctgctcatctacggtgcgtcaaatgtcgagagtggggttccggcccgattcagtggttccgggagtggcacagactttagcctcaacatccatcctgttgaggaagacgatattgccatgtatttttgccaacagtcccgcaaagtcccctggacctttggtggaggaactaagctggagatcaagggcggaggcggaagtggaggcggaggatctggcggcggaggctctgaggtcaagctggtagagagtggaggtgggctggttaaaccaggggggagcagaaaactgagttgtgccgcaagtggcttcaccttttctagctataccatgagctgggtaagacaaactccagcaaagcgccttgagtgggtcgcaacaattagcagcggatcttctactatttattacgctgacactgttaagggccggtttaccatatcaagagacaacgccaagaatacccttttccttcaaatgacttcactgcggtccgaggatacggcaatgtactattgtgcacgacggtggtttctcgactgctggggccaggggactacccttaccgtgtctagtacgcgtgagcagaaactgatctcggaagaggatctggcgaagcccaccacgacgccagcgccgcgaccaccaacaccggcgcccaccatcgcgtcgcagcccctgtccctgcgcccagaggcgtgccggccagcggcggggggcgcagtgcacacgagggggctggacttcgcctgtgacatctacatctgggcgcccttggccgggacttgtggggtccttctcctgtcactggttatcaccctttactgcaaacggggcagaaagaaactcctgtatatattcaaacaaccatttatgagaccagtacaaactactcaagaggaagatggctgtagctgccgatttccagaagaagaagaaggaggatgtgaactgagagtgaagttcagcaggagcgcagacgcccccgcgtaccagcagggccagaaccagctctataacgagctgaatctaggacgaagagaggagtacgatgttttggacaagagacgtggccgggaccctgagatggggggaaagccgagaaggaagaaccctcaggaaggcctgtacaatgaactgcagaaagataagatggcggaggcctacagtgagattgggatgaaaggcgagcgccggaggggcaaggggcacgatggcctttaccagggtctcagtacagccaccaaggacacctacgacgcccttcacatgcaggccctgccccctcgctctagtggctccggcgagggcagaggaagtctactaacctgcggagatgtggaagaaaatcctggcccacatatgaccgagtacaagcccacggtgcgcctcgccacccgcgacgacgtccccagggccgtacgcaccctcgccgccgcgttcgccgactaccccgccacgcgccacaccgtcgatccggaccgccacatcgagcgggtcaccgagctgcaagaactcttcctcacgcgcgtcgggctcgacatcggcaaggtgtgggtcgcggacgacggcgccgcggtggcggtctggaccacgccggagagcgtcgaagcgggggcggtgttcgccgagatcggcccgcgcatggccgagttgagcggttcccggctggccgcgcagcaacagatggaaggcctcctggcgccgcaccggcccaaggagcccgcgtggttcctggccaccgtcggcgtctcgcccgaccaccagggcaagggtctgggcagcgccgtcgtgctccccggagtggaggcggccgagcgcgccggggtgcccgccttcctggagacctccgcgccccgcaacctccccttctacgagcggctcggcttcaccgtcaccgccgacgtcgaggtgcccgaaggaccgcgcacctggtgcatgacccgcaagcccggtgcctga

SEQ ID NO: 1663 - DNA, 2181 bp, Artificial Sequence
  Synthetic Polynucleotides
atggccttaccagtgaccgccttgctcctgccgctggccttgctgctccacgccgccaggccggaccaggtgcagctgcagcagtcgggcccaggactggtgaagccttcggagaccctgtccctcacctgcactgtctctggtgactccatcagtagttactactggagctggatcaggcagcccccagggaagggactggagtggattgggtatatctattacagtgggagcaccaactacaacccctccctcaagagtcgagtcaccatatcagtagacacgtccaagagccagttctccctgaagctgagctctgtgaccgccgcagacacggccgtgtattactgtgcgcgcggcaggtacttcgatgtctggggacgaggcactatggtgactagcagcggcggaggcggaagtggaggcggaggatctggcggcggaggctcttcctcctacgtgctgactcagcctccctccgtgtctgggtctcctggacagtcgatcaccatctcctgcactggaaccagcagtgacgttggtggttataactatgtctcctggtaccaacaacacccaggcaaagcccccaaactcatgatttatgagggcagtaagcggccctcaggggtttctaatcgcttctctggctccaagtctggcaacacggcctccctgacaatctctgggctccaggctgaggacgaggctgattattactgcagctcatatacaaccaggagcacccgagttttcggcggagggaccaagctgaccgtcctaggtgccgccgcaacgcgtgagcagaaactgatctcggaagaggatctggcgaagcccaccacgacgccagcgccgcgaccaccaacaccggcgcccaccatcgcgtcgcagcccctgtccctgcgcccagaggcgtgccggccagcggcggggggcgcagtgcacacgagggggctggacttcgcctgtgacatctacatctgggcgcccttggccgggacttgtggggtccttctcctgtcactggttatcaccctttactgcaaacggggcagaaagaaactcctgtatatattcaaacaaccatttatgagaccagtacaaactactcaagaggaagatggctgtagctgccgatttccagaagaagaagaaggaggatgtgaactgagagtgaagttcagcaggagcgcagacgcccccgcgtaccagcagggccagaaccagctctataacgagctgaatctaggacgaagagaggagtacgatgttttggacaagagacgtggccgggaccctgagatggggggaaagccgagaaggaagaaccctcaggaaggcctgtacaatgaactgcagaaagataagatggcggaggcctacagtgagattgggatgaaaggcgagcgccggaggggcaaggggcacgatggcctttaccagggtctcagtacagccaccaaggacacctacgacgcccttcacatgcaggccctgccccctcgctctagtggctccggcgagggcagaggaagtctactaacctgcggagatgtggaagaaaatcctggcccacatatgaccgagtacaagcccacggtgcgcctcgccacccgcgacgacgtccccagggccgtacgcaccctcgccgccgcgttcgccgactaccccgccacgcgccacaccgtcgatccggaccgccacatcgagcgggtcaccgagctgcaagaactcttcctcacgcgcgtcgggctcgacatcggcaaggtgtgggtcgcggacgacggcgccgcggtggcggtctggaccacgccggagagcgtcgaagcgggggcggtgttcgccgagatcggcccgcgcatggccgagttgagcggttcccggctggccgcgcagcaacagatggaaggcctcctggcgccgcaccggcccaaggagcccgcgtggttcctggccaccgtcggcgtctcgcccgaccaccagggcaagggtctgggcagcgccgtcgtgctccccggagtggaggcggccgagcgcgccggggtgcccgccttcctggagacctccgcgccccgcaacctccccttctacgagcggctcggcttcaccgtcaccgccgacgtcgaggtgcccgaaggaccgcgcacctggtgcatgacccgcaagcccggtgcctga

SEQ ID NO: 1664 - DNA, 2184 bp, Artificial Sequence
  Synthetic Polynucleotides
atggccttaccagtgaccgccttgctcctgccgctggccttgctgctccacgccgccaggccggacatcgtaatgacacagtctcccctgtccctccctgtcacaccaggtgaacctgccagtatttcttgtagatccagtaagtcacttctgcactccaatgggaacacctacctgtattggttccagcaaaagcctggtcaggcacctcgcttgcttatttataggatgtccaatcttgcatccggcgtgccagaccgattctcaggctccggctctggtactgcatttaccctgaaaatctcccgcgtggaagcagaagatgtgggcgtgtactactgtatgcagcacatcgagtaccccttcacgtttggtcaaggcacaaagctggaaatcaaaggcggaggcggaagtggaggcggaggatctggcggcggaggctctcaggtccagctcgtccagtctggacccgaagtcaagaagccaggcgcctctgtgaaggtttcttgtaaggccagcggatatacattcactaattcatggatgaactgggtgaggcagcgccctggcaaggggcttgagtggatcgggcggatttacccaggggatggcgagacaatttacaacgggaaatttcgggtgagagtgacgatcaccgcagacgaatctacaagcacggcctacatggagttgtcctctctcaggagtgaggacaccgccgtctactattgtgctagaggttatgacgactattcattcgcatactggggccagggcaccaccgtcacagtatcatctacgcgtgagcagaaactgatctcggaagaggatctggcgaagcccaccacgacgccagcgccgcgaccaccaacaccggcgcccaccatcgcgtcgcagcccctgtccctgcgcccagaggcgtgccggccagcggcggggggcgcagtgcacacgagggggctggacttcgcctgtgacatctacatctgggcgcccttggccgggacttgtggggtccttctcctgtcactggttatcaccctttactgcaaacggggcagaaagaaactcctgtatatattcaaacaaccatttatgagaccagtacaaactactcaagaggaagatggctgtagctgccgatttccagaagaagaagaaggaggatgtgaactgagagtgaagttcagcaggagcgcagacgcccccgcgtaccagcagggccagaaccagctctataacgagctgaatctaggacgaagagaggagtacgatgttttggacaagagacgtggccgggaccctgagatggggggaaagccgagaaggaagaaccctcaggaaggcctgtacaatgaactgcagaaagataagatggcggaggcctacagtgagattgggatgaaaggcgagcgccggaggggcaaggggcacgatggcctttaccagggtctcagtacagccaccaaggacacctacgacgcccttcacatgcaggccctgccccctcgctctagtggctccggcgagggcagaggaagtctactaacctgcggagatgtggaagaaaatcctggcccacatatgaccgagtacaagcccacggtgcgcctcgccacccgcgacgacgtccccagggccgtacgcaccctcgccgccgcgttcgccgactaccccgccacgcgccacaccgtcgatccggaccgccacatcgagcgggtcaccgagctgcaagaactcttcctcacgcgcgtcgggctcgacatcggcaaggtgtgggtcgcggacgacggcgccgcggtggcggtctggaccacgccggagagcgtcgaagcgggggcggtgttcgccgagatcggcccgcgcatggccgagttgagcggttcccggctggccgcgcagcaacagatggaaggcctcctggcgccgcaccggcccaaggagcccgcgtggttcctggccaccgtcggcgtctcgcccgaccaccagggcaagggtctgggcagcgccgtcgtgctccccggagtggaggcggccgagcgcgccggggtgcccgccttcctggagacctccgcgccccgcaacctccccttctacgagcggctcggcttcaccgtcaccgccgacgtcgaggtgcccgaaggaccgcgcacctggtgcatgacccgcaagcccggtgcctga

SEQ ID NO: 1665 - DNA, 2184 bp, Artificial Sequence
  Synthetic Polynucleotides
atggccttaccagtgaccgccttgctcctgccgctggccttgctgctccacgccgccaggccggacgagatcgtgatgacccagagccctgccaccctgtctctgagccctggcgaaagagccaccctgagctgtagagccagccagagcgtgtccagctacctggcctggtatcagcagaagcccggccaggctccccggctgctgatctacgatgccagcaatagagccaccggcatccccgccagattttccggctctggcagcggcaccgacttcaccctgaccatcagctccctggaacccgaggacttcgccgtgtactactgccaccagtacggcagcagcccccagacctttggacagggcaccaaggtggaaatcaagcggggcggaggcggaagtggaggcggaggatctggcggcggaggctctgaagtgcagctggtgcagtctggggccgaagtgaagaaacccggcagctccgtgaaggtgtcctgcaaggcttccggcggcaccttcagcagctacgccatttcttgggtgcgccaggcccctggacagggactggaatggatgggcggcatcatccccatcttcggcaccgccaactacgcccagaaattccagggcagagtgaccatcaccgccgacgagagcaccagcaccgcctacatggaactgagcagcctgcggagcgaggacacagccgtgtattattgcgccgtgcactacggcgactacgtgttcagcagcatggacgtgtggggccagggcacaaccgtgaccgtgtcatctacgcgtgagcagaaactgatctcggaagaggatctggcgaagcccaccacgacgccagcgccgcgaccaccaacaccggcgcccaccatcgcgtcgcagcccctgtccctgcgcccagaggcgtgccggccagcggcggggggcgcagtgcacacgagggggctggacttcgcctgtgacatctacatctgggcgcccttggccgggacttgtggggtccttctcctgtcactggttatcaccctttactgcaaacggggcagaaagaaactcctgtatatattcaaacaaccatttatgagaccagtacaaactactcaagaggaagatggctgtagctgccgatttccagaagaagaagaaggaggatgtgaactgagagtgaagttcagcaggagcgcagacgcccccgcgtaccagcagggccagaaccagctctataacgagctgaatctaggacgaagagaggagtacgatgttttggacaagagacgtggccgggaccctgagatggggggaaagccgagaaggaagaaccctcaggaaggcctgtacaatgaactgcagaaagataagatggcggaggcctacagtgagattgggatgaaaggcgagcgccggaggggcaaggggcacgatggcctttaccagggtctcagtacagccaccaaggacacctacgacgcccttcacatgcaggccctgccccctcgctctagtggctccggcgagggcagaggaagtctactaacctgcggagatgtggaagaaaatcctggcccacatatgaccgagtacaagcccacggtgcgcctcgccacccgcgacgacgtccccagggccgtacgcaccctcgccgccgcgttcgccgactaccccgccacgcgccacaccgtcgatccggaccgccacatcgagcgggtcaccgagctgcaagaactcttcctcacgcgcgtcgggctcgacatcggcaaggtgtgggtcgcggacgacggcgccgcggtggcggtctggaccacgccggagagcgtcgaagcgggggcggtgttcgccgagatcggcccgcgcatggccgagttgagcggttcccggctggccgcgcagcaacagatggaaggcctcctggcgccgcaccggcccaaggagcccgcgtggttcctggccaccgtcggcgtctcgcccgaccaccagggcaagggtctgggcagcgccgtcgtgctccccggagtggaggcggccgagcgcgccggggtgcccgccttcctggagacctccgcgccccgcaacctccccttctacgagcggctcggcttcaccgtcaccgccgacgtcgaggtgcccgaaggaccgcgcacctggtgcatgacccgcaagcccggtgcctga

SEQ ID NO: 1666 - DNA, 2193 bp, Artificial Sequence
  Synthetic Polynucleotides
atggccttaccagtgaccgccttgctcctgccgctggccttgctgctccacgccgccaggccggacgagacaaccctgacacagagccctggcaccctgagcctgtctccaggcgaaagagccacactgagctgtcgggccagccagagcgtgtccagctcttacctggcctggtatcagcagaagcccggccaggctccccggctgctgatctatggcgcttctagcagagccaccggcatccccgatagattcagcggctctggcagcggcaccgacttcaccctgaccatcagcagactggaacccgaggacttcgccgtgtactactgccagcagtacggcagcagccccagaacattcggccagggcaccaaggtggaaatcaagagaggcggaggcggaagtggaggcggaggatctggcggcggaggctctgaagtgcaactggtgcagagcggagccgaagtgaagaaacccggcagctccgtgaaggtgtcctgcaaggcttccggcggcaccttcagcagctacgccatttcttgggtgcgccaggcccctggacagggcctggaatggatgggcggcatcatccccatcttcggcaccgccaactacgcccagaaattccagggcagagtgaccatcaccgccgacgagagcaccagcaccgcctacatggaactgagcagcctgcggagcgaggacacagccgtgtattattgcgccagaggccccgagtattgcatcaacggcgtgtgcagcctggacgtgtggggccagggaacaaccgtgaccgtgtctagcacgcgtgagcagaaactgatctcggaagaggatctggcgaagcccaccacgacgccagcgccgcgaccaccaacaccggcgcccaccatcgcgtcgcagcccctgtccctgcgcccagaggcgtgccggccagcggcggggggcgcagtgcacacgagggggctggacttcgcctgtgacatctacatctgggcgcccttggccgggacttgtggggtccttctcctgtcactggttatcaccctttactgcaaacggggcagaaagaaactcctgtatatattcaaacaaccatttatgagaccagtacaaactactcaagaggaagatggctgtagctgccgatttccagaagaagaagaaggaggatgtgaactgagagtgaagttcagcaggagcgcagacgcccccgcgtaccagcagggccagaaccagctctataacgagctgaatctaggacgaagagaggagtacgatgttttggacaagagacgtggccgggaccctgagatggggggaaagccgagaaggaagaaccctcaggaaggcctgtacaatgaactgcagaaagataagatggcggaggcctacagtgagattgggatgaaaggcgagcgccggaggggcaaggggcacgatggcctttaccagggtctcagtacagccaccaaggacacctacgacgcccttcacatgcaggccctgccccctcgctctagtggctccggcgagggcagaggaagtctactaacctgcggagatgtggaagaaaatcctggcccacatatgaccgagtacaagcccacggtgcgcctcgccacccgcgacgacgtccccagggccgtacgcaccctcgccgccgcgttcgccgactaccccgccacgcgccacaccgtcgatccggaccgccacatcgagcgggtcaccgagctgcaagaactcttcctcacgcgcgtcgggctcgacatcggcaaggtgtgggtcgcggacgacggcgccgcggtggcggtctggaccacgccggagagcgtcgaagcgggggcggtgttcgccgagatcggcccgcgcatggccgagttgagcggttcccggctggccgcgcagcaacagatggaaggcctcctggcgccgcaccggcccaaggagcccgcgtggttcctggccaccgtcggcgtctcgcccgaccaccagggcaagggtctgggcagcgccgtcgtgctccccggagtggaggcggccgagcgcgccggggtgcccgccttcctggagacctccgcgccccgcaacctccccttctacgagcggctcggcttcaccgtcaccgccgacgtcgaggtgcccgaaggaccgcgcacctggtgcatgacccgcaagcccggtgcctga

SEQ ID NO: 1667 - DNA, 2199 bp, Artificial Sequence
  Synthetic Polynucleotides
atggccttaccagtgaccgccttgctcctgccgctggccttgctgctccacgccgccaggccggacatcgagctgacccagagccctagcagcctggctgtgtctgccggcgagaaagtgaccatgagctgcaagagcagccagagcctgctgaacagccggacccggaagaatcaactggcctggtatcagcagaagcccggccagtctcccgagctgctgatctactgggccagcaccagacagagcggcgtgcccgatagattcacaggcagcggctccggcaccgacttcaccctgacaatcagcagcgtgcaggccgaggacctggccgtgtactactgccagcagagctacaacctgctgaccttcggccctggcaccaagctggaagtgaagagaggcggaggcggaagtggaggcggaggatctggcggcggaggctctgtgaagctgcaggaatctggcggcggattcgtgaagcctggcggctctctgaaggtgtcctgtgccgccagcggcttcaccttcagcagctacgccatgtcctgggtgcgcctgagccccgagatgagactggaatgggtggcaaccatcagctccgcaggcggctacatcttctacagcgactccgtgcagggccggttcaccatctccagagacaacgccaagaacaccctgcatctgcagatgggcagcctgagaagcggcgacaccgccatgtactattgcgccagacagggcttcggcaactacggcgactactacgctatggactactggggccagggaaccaccgtgaccgtgtctagtacgcgtgagcagaaactgatctcggaagaggatctggcgaagcccaccacgacgccagcgccgcgaccaccaacaccggcgcccaccatcgcgtcgcagcccctgtccctgcgcccagaggcgtgccggccagcggcggggggcgcagtgcacacgagggggctggacttcgcctgtgacatctacatctgggcgcccttggccgggacttgtggggtccttctcctgtcactggttatcaccctttactgcaaacggggcagaaagaaactcctgtatatattcaaacaaccatttatgagaccagtacaaactactcaagaggaagatggctgtagctgccgatttccagaagaagaagaaggaggatgtgaactgagagtgaagttcagcaggagcgcagacgcccccgcgtaccagcagggccagaaccagctctataacgagctgaatctaggacgaagagaggagtacgatgttttggacaagagacgtggccgggaccctgagatggggggaaagccgagaaggaagaaccctcaggaaggcctgtacaatgaactgcagaaagataagatggcggaggcctacagtgagattgggatgaaaggcgagcgccggaggggcaaggggcacgatggcctttaccagggtctcagtacagccaccaaggacacctacgacgcccttcacatgcaggccctgccccctcgctctagtggctccggcgagggcagaggaagtctactaacctgcggagatgtggaagaaaatcctggcccacatatgaccgagtacaagcccacggtgcgcctcgccacccgcgacgacgtccccagggccgtacgcaccctcgccgccgcgttcgccgactaccccgccacgcgccacaccgtcgatccggaccgccacatcgagcgggtcaccgagctgcaagaactcttcctcacgcgcgtcgggctcgacatcggcaaggtgtgggtcgcggacgacggcgccgcggtggcggtctggaccacgccggagagcgtcgaagcgggggcggtgttcgccgagatcggcccgcgcatggccgagttgagcggttcccggctggccgcgcagcaacagatggaaggcctcctggcgccgcaccggcccaaggagcccgcgtggttcctggccaccgtcggcgtctcgcccgaccaccagggcaagggtctgggcagcgccgtcgtgctccccggagtggaggcggccgagcgcgccggggtgcccgccttcctggagacctccgcgccccgcaacctccccttctacgagcggctcggcttcaccgtcaccgccgacgtcgaggtgcccgaaggaccgcgcacctggtgcatgacccgcaagcccggtgcctga

SEQ ID NO: 1668 - DNA, 2196 bp, Artificial Sequence
  Synthetic Polynucleotides
atggccttaccagtgaccgccttgctcctgccgctggccttgctgctccacgccgccaggccggacatccagatgacccagagccccagcagcctgtctgccagcgtgggcgacagagtgaccatcacctgtcggagcagccagaacatcgtgcacagcaacggcaacacctacctggactggtatcagcagacccccggcaaggcccccaagctgctgatctacaaggtgtccaacagattcagcggcgtgcccagcaggtttagcggctctggcagcggcaccgacttcaccttcaccatcagctccctccagcccgaggacattgccacctactactgcttccagtacagccacgtgccctggaccttcggccagggcacaaagctccagatcggcggaggcggaagtggaggcggaggatctggcggcggaggctctcaggtgcagctccagcagtctggggccgaagtgaagaaacccggcagcagcgtgaaggtgtcctgcaaggccagcggctacacctttaccaactactacatctactgggtgcgccaggccccaggccagggactggaatggatcggcggcatcaatcctaccagcggcggcagcaacttcaacgagaagttcaagacccgcgtgacaatcaccgccgacgagagcagcaccaccgcctacatggaactgagcagcctgcggagcgaggataccgccttctacttctgcacccggcagggcctgtggttcgactctgatggcagaggcttcgacttctggggccagggaaccaccgtgaccgtgtctagtacgcgtgagcagaaactgatctcggaagaggatctggcgaagcccaccacgacgccagcgccgcgaccaccaacaccggcgcccaccatcgcgtcgcagcccctgtccctgcgcccagaggcgtgccggccagcggcggggggcgcagtgcacacgagggggctggacttcgcctgtgacatctacatctgggcgcccttggccgggacttgtggggtccttctcctgtcactggttatcaccctttactgcaaacggggcagaaagaaactcctgtatatattcaaacaaccatttatgagaccagtacaaactactcaagaggaagatggctgtagctgccgatttccagaagaagaagaaggaggatgtgaactgagagtgaagttcagcaggagcgcagacgcccccgcgtaccagcagggccagaaccagctctataacgagctgaatctaggacgaagagaggagtacgatgttttggacaagagacgtggccgggaccctgagatggggggaaagccgagaaggaagaaccctcaggaaggcctgtacaatgaactgcagaaagataagatggcggaggcctacagtgagattgggatgaaaggcgagcgccggaggggcaaggggcacgatggcctttaccagggtctcagtacagccaccaaggacacctacgacgcccttcacatgcaggccctgccccctcgctctagtggctccggcgagggcagaggaagtctactaacctgcggagatgtggaagaaaatcctggcccacatatgaccgagtacaagcccacggtgcgcctcgccacccgcgacgacgtccccagggccgtacgcaccctcgccgccgcgttcgccgactaccccgccacgcgccacaccgtcgatccggaccgccacatcgagcgggtcaccgagctgcaagaactcttcctcacgcgcgtcgggctcgacatcggcaaggtgtgggtcgcggacgacggcgccgcggtggcggtctggaccacgccggagagcgtcgaagcgggggcggtgttcgccgagatcggcccgcgcatggccgagttgagcggttcccggctggccgcgcagcaacagatggaaggcctcctggcgccgcaccggcccaaggagcccgcgtggttcctggccaccgtcggcgtctcgcccgaccaccagggcaagggtctgggcagcgccgtcgtgctccccggagtggaggcggccgagcgcgccggggtgcccgccttcctggagacctccgcgccccgcaacctccccttctacgagcggctcggcttcaccgtcaccgccgacgtcgaggtgcccgaaggaccgcgcacctggtgcatgacccgcaagcccggtgcctga

SEQ ID NO: 1669 - DNA, 1884 bp, Artificial Sequence
  Synthetic Polynucleotides
atggccttaccagtgaccgccttgctcctgccgctggccttgctgctccacgccgccaggccgctgttcaaccaggaagtgcagatccccctgaccgagagctactgcggcccctgccccaagaactggatctgctacaagaacaactgctaccagttcttcgacgagagcaagaattggtacgagagccaggcttcctgcatgagccagaacgccagcctgctgaaggtgtacagcaaagaggaccaggatctgctgaagctggtcaagagctaccactggatgggcctggtgcacatccccaccaacggctcttggcagtgggaggacggcagcatcctgagccccaacctgctgaccatcatcgagatgcagaagggcgactgcgccctgtacgccagcagcttcaagggctacatcgagaactgctccacccccaacacctacatctgtatgcagcggaccgtgggcggaggcggaagtggaggcggaggagacacgcgtgagcagaaactgatctcggaagaggatctggcgaagcccaccacgacgccagcgccgcgaccaccaacaccggcgcccaccatcgcgtcgcagcccctgtccctgcgcccagaggcgtgccggccagcggcggggggcgcagtgcacacgagggggctggacttcgcctgtgacatctacatctgggcgcccttggccgggacttgtggggtccttctcctgtcactggttatcaccctttactgcaaacggggcagaaagaaactcctgtatatattcaaacaaccatttatgagaccagtacaaactactcaagaggaagatggctgtagctgccgatttccagaagaagaagaaggaggatgtgaactgagagtgaagttcagcaggagcgcagacgcccccgcgtaccagcagggccagaaccagctctataacgagctgaatctaggacgaagagaggagtacgatgttttggacaagagacgtggccgggaccctgagatggggggaaagccgagaaggaagaaccctcaggaaggcctgtacaatgaactgcagaaagataagatggcggaggcctacagtgagattgggatgaaaggcgagcgccggaggggcaaggggcacgatggcctttaccagggtctcagtacagccaccaaggacacctacgacgcccttcacatgcaggccctgccccctcgctctagtggctccggcgagggcagaggaagtctactaacctgcggagatgtggaagaaaatcctggcccacatatgaccgagtacaagcccacggtgcgcctcgccacccgcgacgacgtccccagggccgtacgcaccctcgccgccgcgttcgccgactaccccgccacgcgccacaccgtcgatccggaccgccacatcgagcgggtcaccgagctgcaagaactcttcctcacgcgcgtcgggctcgacatcggcaaggtgtgggtcgcggacgacggcgccgcggtggcggtctggaccacgccggagagcgtcgaagcgggggcggtgttcgccgagatcggcccgcgcatggccgagttgagcggttcccggctggccgcgcagcaacagatggaaggcctcctggcgccgcaccggcccaaggagcccgcgtggttcctggccaccgtcggcgtctcgcccgaccaccagggcaagggtctgggcagcgccgtcgtgctccccggagtggaggcggccgagcgcgccggggtgcccgccttcctggagacctccgcgccccgcaacctccccttctacgagcggctcggcttcaccgtcaccgccgacgtcgaggtgcccgaaggaccgcgcacctggtgcatgacccgcaagcccggtgcctga

SEQ ID NO: 1670 - DNA, 2166 bp, Artificial Sequence
  Synthetic Polynucleotides
atggccttaccagtgaccgccttgctcctgccgctggccttgctgctccacgccgccaggccggagatcgtgctgacacagagccctggcaccctgagcctgtctccaggcgaaagagccacactgagctgtcgggccagccagagcgtgtccagctcttacctggcctggtatcagcagaagcccggccaggctccccggctgctgatctatggcgcttctagcagagccaccggcatccccgatagattcagcggctctggcagcggcaccgacttcaccctgaccatcagcagactggaacccgaggacttcgccgtgtactactgccagcagtacggcagcagcccctggacctttggacagggcaccaaggtggaaatcaagagaggcggaggcggaagtggaggcggaggatctggcggcggaggctctcaagtgcatctccaggaaagcggacccggcctcgtgaagcctagcgagacactgagcctgacctgcaccgtgtccgacgacagcatcagcagctactactggtcctggatcagacagccccctggcaagggcctggaatggatcggccacatcagctacagcggcagcgccaactacaaccccagcctgaagtccagagtgaccatctccgtggacaccagcaagaaccagttctccctgaagctgagcagcgtgacagccgccgacaccgccgtgtattattgcgccaactgggacgacgccttcaacatctggggccagggcacaatggtcaccgtgtctagcacgcgtgagcagaaactgatctcggaagaggatctggcgaagcccaccacgacgccagcgccgcgaccaccaacaccggcgcccaccatcgcgtcgcagcccctgtccctgcgcccagaggcgtgccggccagcggcggggggcgcagtgcacacgagggggctggacttcgcctgtgacatctacatctgggcgcccttggccgggacttgtggggtccttctcctgtcactggttatcaccctttactgcaaacggggcagaaagaaactcctgtatatattcaaacaaccatttatgagaccagtacaaactactcaagaggaagatggctgtagctgccgatttccagaagaagaagaaggaggatgtgaactgagagtgaagttcagcaggagcgcagacgcccccgcgtaccagcagggccagaaccagctctataacgagctgaatctaggacgaagagaggagtacgatgttttggacaagagacgtggccgggaccctgagatggggggaaagccgagaaggaagaaccctcaggaaggcctgtacaatgaactgcagaaagataagatggcggaggcctacagtgagattgggatgaaaggcgagcgccggaggggcaaggggcacgatggcctttaccagggtctcagtacagccaccaaggacacctacgacgcccttcacatgcaggccctgccccctcgctctagtggctccggcgagggcagaggaagtctactaacctgcggagatgtggaagaaaatcctggcccacatatgaccgagtacaagcccacggtgcgcctcgccacccgcgacgacgtccccagggccgtacgcaccctcgccgccgcgttcgccgactaccccgccacgcgccacaccgtcgatccggaccgccacatcgagcgggtcaccgagctgcaagaactcttcctcacgcgcgtcgggctcgacatcggcaaggtgtgggtcgcggacgacggcgccgcggtggcggtctggaccacgccggagagcgtcgaagcgggggcggtgttcgccgagatcggcccgcgcatggccgagttgagcggttcccggctggccgcgcagcaacagatggaaggcctcctggcgccgcaccggcccaaggagcccgcgtggttcctggccaccgtcggcgtctcgcccgaccaccagggcaagggtctgggcagcgccgtcgtgctccccggagtggaggcggccgagcgcgccggggtgcccgccttcctggagacctccgcgccccgcaacctccccttctacgagcggctcggcttcaccgtcaccgccgacgtcgaggtgcccgaaggaccgcgcacctggtgcatgacccgcaagcccggtgcctga

SEQ ID NO: 1671 - DNA, 2172 bp, Artificial Sequence
  Synthetic Polynucleotides
atggccttaccagtgaccgccttgctcctgccgctggccttgctgctccacgccgccaggccggacgtcgtgatgacccagacccctctgaccctgagcgtgaccattggacagcccgccagcatctcctgcaagagcagccagagcctgctggacagcgacggcaagacctatctccactggctgttgcaacggccaggtcagagccccaagagactgatcttcctggtgtccaagctggactccggcgtgcccgatagattcacaggcagcggctccggcaccgacttcaccctgaagatcagccgggtggaagccgaggacctgggcgtgtactactgttggcagggcacccacttcccccagacctttggcggcggaacaaagctggaaatcaagggcggaggcggaagtggaggcggaggatctggcggcggaggctctgtgcaactccaagagtccggccctgacctcgtgaagcctagccagtctctgagcctgacctgcaccgtgaccggctacagcatcaccagcggctactcttggcactggatcagacagttccccggcaacaagctggaatggatgggctacatccactacagcggcgacaccgactacaaccccagcctgaagtcccggttctccatcaccagagacaccagcaagaaccagttcttcttgcaactgaactccgtgaccaccgaggacaccgccacctactactgtgccacccctggcggctttgtgtactggggccagggaacactcgtgaccgtgtcctctacgcgtgagcagaaactgatctcggaagaggatctggcgaagcccaccacgacgccagcgccgcgaccaccaacaccggcgcccaccatcgcgtcgcagcccctgtccctgcgcccagaggcgtgccggccagcggcggggggcgcagtgcacacgagggggctggacttcgcctgtgacatctacatctgggcgcccttggccgggacttgtggggtccttctcctgtcactggttatcaccctttactgcaaacggggcagaaagaaactcctgtatatattcaaacaaccatttatgagaccagtacaaactactcaagaggaagatggctgtagctgccgatttccagaagaagaagaaggaggatgtgaactgagagtgaagttcagcaggagcgcagacgcccccgcgtaccagcagggccagaaccagctctataacgagctgaatctaggacgaagagaggagtacgatgttttggacaagagacgtggccgggaccctgagatggggggaaagccgagaaggaagaaccctcaggaaggcctgtacaatgaactgcagaaagataagatggcggaggcctacagtgagattgggatgaaaggcgagcgccggaggggcaaggggcacgatggcctttaccagggtctcagtacagccaccaaggacacctacgacgcccttcacatgcaggccctgccccctcgctctagtggctccggcgagggcagaggaagtctactaacctgcggagatgtggaagaaaatcctggcccacatatgaccgagtacaagcccacggtgcgcctcgccacccgcgacgacgtccccagggccgtacgcaccctcgccgccgcgttcgccgactaccccgccacgcgccacaccgtcgatccggaccgccacatcgagcgggtcaccgagctgcaagaactcttcctcacgcgcgtcgggctcgacatcggcaaggtgtgggtcgcggacgacggcgccgcggtggcggtctggaccacgccggagagcgtcgaagcgggggcggtgttcgccgagatcggcccgcgcatggccgagttgagcggttcccggctggccgcgcagcaacagatggaaggcctcctggcgccgcaccggcccaaggagcccgcgtggttcctggccaccgtcggcgtctcgcccgaccaccagggcaagggtctgggcagcgccgtcgtgctccccggagtggaggcggccgagcgcgccggggtgcccgccttcctggagacctccgcgccccgcaacctccccttctacgagcggctcggcttcaccgtcaccgccgacgtcgaggtgcccgaaggaccgcgcacctggtgcatgacccgcaagcccggtgcctga

SEQ ID NO: 1672 - DNA, 2184 bp, Artificial Sequence
  Synthetic Polynucleotides
atggccttaccagtgaccgccttgctcctgccgctggccttgctgctccacgccgccaggccggaccagagcgagctgacccagcctagaagcgtgtccggcagccctggacagagcgtgaccatcagctgtaccggcaccgagagagatgtgggcggctacaactacgtgtcctggtatcagcagcaccccggcaaggcccccaagctgatcatccacgacgtgatcgagcggagcagcggcgtgcccgatagattcagcggcagcaagagcggcaacaccgccagcctgacaatcagcggactgcaggccgaggacgaggccgactactactgctggtctttcgctggcggctactacgtgttcggcaccggcacagatgtgaccgtgctgggcggaggcggaagtggaggcggaggatctggcggcggaggctctttcgaagtgcagctgctggaatctggcggcggactggtgcagcctggcggatctctgagactgagctgtgccgcctccggcttcaccttcagcacctaccagatgagctgggtgcgccaggcccctggcaaaggactggaatgggtgtccgggatcgtgtccagcggcggctctacagcctacgccgatagcgtgaagggccggttcaccatcagccgggacaacagcaagaacaccctgtacctgcagatgaacagcctgagagccgaggacaccgccgtgtactattgtgccggcgagctgctgccctactacggcatggatgtgtggggccagggcaccaccgtgaccgtgtcatctacgcgtgagcagaaactgatctcggaagaggatctggcgaagcccaccacgacgccagcgccgcgaccaccaacaccggcgcccaccatcgcgtcgcagcccctgtccctgcgcccagaggcgtgccggccagcggcggggggcgcagtgcacacgagggggctggacttcgcctgtgacatctacatctgggcgcccttggccgggacttgtggggtccttctcctgtcactggttatcaccctttactgcaaacggggcagaaagaaactcctgtatatattcaaacaaccatttatgagaccagtacaaactactcaagaggaagatggctgtagctgccgatttccagaagaagaagaaggaggatgtgaactgagagtgaagttcagcaggagcgcagacgcccccgcgtaccagcagggccagaaccagctctataacgagctgaatctaggacgaagagaggagtacgatgttttggacaagagacgtggccgggaccctgagatggggggaaagccgagaaggaagaaccctcaggaaggcctgtacaatgaactgcagaaagataagatggcggaggcctacagtgagattgggatgaaaggcgagcgccggaggggcaaggggcacgatggcctttaccagggtctcagtacagccaccaaggacacctacgacgcccttcacatgcaggccctgccccctcgctctagtggctccggcgagggcagaggaagtctactaacctgcggagatgtggaagaaaatcctggcccacatatgaccgagtacaagcccacggtgcgcctcgccacccgcgacgacgtccccagggccgtacgcaccctcgccgccgcgttcgccgactaccccgccacgcgccacaccgtcgatccggaccgccacatcgagcgggtcaccgagctgcaagaactcttcctcacgcgcgtcgggctcgacatcggcaaggtgtgggtcgcggacgacggcgccgcggtggcggtctggaccacgccggagagcgtcgaagcgggggcggtgttcgccgagatcggcccgcgcatggccgagttgagcggttcccggctggccgcgcagcaacagatggaaggcctcctggcgccgcaccggcccaaggagcccgcgtggttcctggccaccgtcggcgtctcgcccgaccaccagggcaagggtctgggcagcgccgtcgtgctccccggagtggaggcggccgagcgcgccggggtgcccgccttcctggagacctccgcgccccgcaacctccccttctacgagcggctcggcttcaccgtcaccgccgacgtcgaggtgcccgaaggaccgcgcacctggtgcatgacccgcaagcccggtgcctga

SEQ ID NO: 1673 - DNA, 2181 bp, Artificial Sequence
  Synthetic Polynucleotides
atggccttaccagtgaccgccttgctcctgccgctggccttgctgctccacgccgccaggccggaccagagcgagctgacccagcctagaagcgtgtccggcagccctggacagagcgtgaccatcagctgtaccggcaccgagagagatgtgggcggctacaactacgtgtcctggtatcagcagcaccccggcaaggcccccaagctgatcatccacgacgtgatcgagcggagcagcggcgtgcccgatagattcagcggcagcaagagcggcaacaccgccagcctgacaatcagcggactgcaggccgaggacgaggccgactactactgctggtctttcgctggcggctactacgtgttcggcaccggcacagatgtgaccgtgctgggcggaggcggaagtggaggcggaggatctggcggcggaggctctgaagtgcagctgctggaatctggcggcggactggtgcagcctggcggatctctgagactgagctgtgccgccagcggcttcaccttcagcacctacgagatgcactgggtgcgccaggcccctggcaaaggactggaatgggtgtccgtgatcctgagcagcggcggagagacaaactacgccgacagcgtgaagggccggttcaccatcagccgggacaacagcaagaacaccctgtacctccagatgaacagcctgcgggccgaggacaccgccgtgtactattgtgccggaatgctgctgccctactacggcatggatgtgtggggccagggcaccaccgtgaccgtgtcatctacgcgtgagcagaaactgatctcggaagaggatctggcgaagcccaccacgacgccagcgccgcgaccaccaacaccggcgcccaccatcgcgtcgcagcccctgtccctgcgcccagaggcgtgccggccagcggcggggggcgcagtgcacacgagggggctggacttcgcctgtgacatctacatctgggcgcccttggccgggacttgtggggtccttctcctgtcactggttatcaccctttactgcaaacggggcagaaagaaactcctgtatatattcaaacaaccatttatgagaccagtacaaactactcaagaggaagatggctgtagctgccgatttccagaagaagaagaaggaggatgtgaactgagagtgaagttcagcaggagcgcagacgcccccgcgtaccagcagggccagaaccagctctataacgagctgaatctaggacgaagagaggagtacgatgttttggacaagagacgtggccgggaccctgagatggggggaaagccgagaaggaagaaccctcaggaaggcctgtacaatgaactgcagaaagataagatggcggaggcctacagtgagattgggatgaaaggcgagcgccggaggggcaaggggcacgatggcctttaccagggtctcagtacagccaccaaggacacctacgacgcccttcacatgcaggccctgccccctcgctctagtggctccggcgagggcagaggaagtctactaacctgcggagatgtggaagaaaatcctggcccacatatgaccgagtacaagcccacggtgcgcctcgccacccgcgacgacgtccccagggccgtacgcaccctcgccgccgcgttcgccgactaccccgccacgcgccacaccgtcgatccggaccgccacatcgagcgggtcaccgagctgcaagaactcttcctcacgcgcgtcgggctcgacatcggcaaggtgtgggtcgcggacgacggcgccgcggtggcggtctggaccacgccggagagcgtcgaagcgggggcggtgttcgccgagatcggcccgcgcatggccgagttgagcggttcccggctggccgcgcagcaacagatggaaggcctcctggcgccgcaccggcccaaggagcccgcgtggttcctggccaccgtcggcgtctcgcccgaccaccagggcaagggtctgggcagcgccgtcgtgctccccggagtggaggcggccgagcgcgccggggtgcccgccttcctggagacctccgcgccccgcaacctccccttctacgagcggctcggcttcaccgtcaccgccgacgtcgaggtgcccgaaggaccgcgcacctggtgcatgacccgcaagcccggtgcctga

SEQ ID NO: 1674 - DNA, 1887 bp, Artificial Sequence
  Synthetic Polynucleotides
atggccttaccagtgaccgccttgctcctgccgctggccttgctgctccacgccgccaggccgggctggtttctggacagccctgacagaccctggaatcctccaacattcagccccgctctgctggtggttaccgagggcgataatgccaccttcacctgtagcttcagcaacaccagcgagagcttcgtgctgaactggtacagaatgagccccagcaaccagaccgacaagctggccgcctttcctgaggatagaagccagcctggacaggactgccggttcagagttacccagctgcctaacggcagagacttccacatgagcgttgtgcgggccagaagaaacgacagcggcacatatctgtgcggagccatctctctggcccctaaggctcagatcaaagagagcctgagagccgagctgagagtgacagaaagacgggccgaagtgcccacagctcacccttcaccttctccaagacctgccggccagttccagacgcgtgagcagaaactgatctcggaagaggatctggcgaagcccaccacgacgccagcgccgcgaccaccaacaccggcgcccaccatcgcgtcgcagcccctgtccctgcgcccagaggcgtgccggccagcggcggggggcgcagtgcacacgagggggctggacttcgcctgtgacatctacatctgggcgcccttggccgggacttgtggggtccttctcctgtcactggttatcaccctttactgcaaacggggcagaaagaaactcctgtatatattcaaacaaccatttatgagaccagtacaaactactcaagaggaagatggctgtagctgccgatttccagaagaagaagaaggaggatgtgaactgagagtgaagttcagcaggagcgcagacgcccccgcgtaccagcagggccagaaccagctctataacgagctgaatctaggacgaagagaggagtacgatgttttggacaagagacgtggccgggaccctgagatggggggaaagccgagaaggaagaaccctcaggaaggcctgtacaatgaactgcagaaagataagatggcggaggcctacagtgagattgggatgaaaggcgagcgccggaggggcaaggggcacgatggcctttaccagggtctcagtacagccaccaaggacacctacgacgcccttcacatgcaggccctgccccctcgctctagtggctccggcgagggcagaggaagtctactaacctgcggagatgtggaagaaaatcctggcccacatatgaccgagtacaagcccacggtgcgcctcgccacccgcgacgacgtccccagggccgtacgcaccctcgccgccgcgttcgccgactaccccgccacgcgccacaccgtcgatccggaccgccacatcgagcgggtcaccgagctgcaagaactcttcctcacgcgcgtcgggctcgacatcggcaaggtgtgggtcgcggacgacggcgccgcggtggcggtctggaccacgccggagagcgtcgaagcgggggcggtgttcgccgagatcggcccgcgcatggccgagttgagcggttcccggctggccgcgcagcaacagatggaaggcctcctggcgccgcaccggcccaaggagcccgcgtggttcctggccaccgtcggcgtctcgcccgaccaccagggcaagggtctgggcagcgccgtcgtgctccccggagtggaggcggccgagcgcgccggggtgcccgccttcctggagacctccgcgccccgcaacctccccttctacgagcggctcggcttcaccgtcaccgccgacgtcgaggtgcccgaaggaccgcgcacctggtgcatgacccgcaagcccggtgcctga

SEQ ID NO: 1675 - DNA, 2172 bp, Artificial Sequence
  Synthetic Polynucleotides
atggccttaccagtgaccgccttgctcctgccgctggccttgctgctccacgccgccaggccggacatccagatgacacagagccctagcagcctgtctgccagcgtgggagacagagtgaccatcacctgtagagccagccaggatgtgtctacagccgtggcctggtatcagcagaagcctggaaaggcccctaagctgctgatctacagcgccagctttctgtacagcggcgtgcccagcagattttctggcagcggctctggcaccgacttcaccctgacaatatccagcctccagcctgaggacttcgccacctactactgccagcagtacctgtatcaccccgccacctttggacagggcaccaaggtggaaatcaagagaggcggaggcggaagtggaggcggaggatctggcggcggaggctctgaagtgcagctggttgaatcaggtggcggcctggttcaacctggcggatctctgagactgagctgtgccgccagcggcttcacctttagcgacagctggattcactgggtccgacaggcccctggcaaaggacttgaatgggtcgcctggatcagcccttatggcggcagcacctattacgccgacagcgtgaagggcagattcaccatcagcgccgacaccagcaagaacaccgcctacctccagatgaactccctgagagccgaagataccgccgtgtactactgcgccagaaggcattggcctggcggctttgattattggggccagggcacactggtcaccgtgtcatctacgcgtgagcagaaactgatctcggaagaggatctggcgaagcccaccacgacgccagcgccgcgaccaccaacaccggcgcccaccatcgcgtcgcagcccctgtccctgcgcccagaggcgtgccggccagcggcggggggcgcagtgcacacgagggggctggacttcgcctgtgacatctacatctgggcgcccttggccgggacttgtggggtccttctcctgtcactggttatcaccctttactgcaaacggggcagaaagaaactcctgtatatattcaaacaaccatttatgagaccagtacaaactactcaagaggaagatggctgtagctgccgatttccagaagaagaagaaggaggatgtgaactgagagtgaagttcagcaggagcgcagacgcccccgcgtaccagcagggccagaaccagctctataacgagctgaatctaggacgaagagaggagtacgatgttttggacaagagacgtggccgggaccctgagatggggggaaagccgagaaggaagaaccctcaggaaggcctgtacaatgaactgcagaaagataagatggcggaggcctacagtgagattgggatgaaaggcgagcgccggaggggcaaggggcacgatggcctttaccagggtctcagtacagccaccaaggacacctacgacgcccttcacatgcaggccctgccccctcgctctagtggctccggcgagggcagaggaagtctactaacctgcggagatgtggaagaaaatcctggcccacatatgaccgagtacaagcccacggtgcgcctcgccacccgcgacgacgtccccagggccgtacgcaccctcgccgccgcgttcgccgactaccccgccacgcgccacaccgtcgatccggaccgccacatcgagcgggtcaccgagctgcaagaactcttcctcacgcgcgtcgggctcgacatcggcaaggtgtgggtcgcggacgacggcgccgcggtggcggtctggaccacgccggagagcgtcgaagcgggggcggtgttcgccgagatcggcccgcgcatggccgagttgagcggttcccggctggccgcgcagcaacagatggaaggcctcctggcgccgcaccggcccaaggagcccgcgtggttcctggccaccgtcggcgtctcgcccgaccaccagggcaagggtctgggcagcgccgtcgtgctccccggagtggaggcggccgagcgcgccggggtgcccgccttcctggagacctccgcgccccgcaacctccccttctacgagcggctcggcttcaccgtcaccgccgacgtcgaggtgcccgaaggaccgcgcacctggtgcatgacccgcaagcccggtgcctga

SEQ ID NO: 1676 - DNA, 2175 bp, Artificial Sequence
  Synthetic Polynucleotides
atggccttaccagtgaccgccttgctcctgccgctggccttgctgctccacgccgccaggccggccatcgtgatgacccagacaccttctccagtgtctgccgccgttggcggcacagtgacaatcaactgtcaggccagcgagagcgtgtacagcaacaactacctgagctggttccagcagaagcccggccagcctcctaagctgctgatctacctggcctccacactggcaagcggagtgcccagtagattcaaaggcagcggctctggcacccagttcaccctgacaattagcggcgtgcagtgtgacgatgccgccacctattactgcatcggcggcaagagcagcagcaccgatggcaatgcttttggcggcggaacagaggtggtcgttagaggcggaggcggaagtggaggcggaggatctggcggcggaggctctcaatctctggaagaaagcggaggcagactggtcaagcccgacgagacactgaccatcacctgtaccgtgtccggcatcgacctgagcagcaatggactgacctgggtccgacaagctcctggcgaaggactggaatggatcggcaccatcaacaaggacgccagcgcctactatgcctcctgggccaaaggcaggctgaccatctctaagcccagctccacaaaggtggacctgaagatcacaagccccaccaccgaggacaccgccacatacttttgtggccggatcgccttcaagaccggcacctctatttggggacctggcacactggtcaccgtgtctagtacgcgtgagcagaaactgatctcggaagaggatctggcgaagcccaccacgacgccagcgccgcgaccaccaacaccggcgcccaccatcgcgtcgcagcccctgtccctgcgcccagaggcgtgccggccagcggcggggggcgcagtgcacacgagggggctggacttcgcctgtgacatctacatctgggcgcccttggccgggacttgtggggtccttctcctgtcactggttatcaccctttactgcaaacggggcagaaagaaactcctgtatatattcaaacaaccatttatgagaccagtacaaactactcaagaggaagatggctgtagctgccgatttccagaagaagaagaaggaggatgtgaactgagagtgaagttcagcaggagcgcagacgcccccgcgtaccagcagggccagaaccagctctataacgagctgaatctaggacgaagagaggagtacgatgttttggacaagagacgtggccgggaccctgagatggggggaaagccgagaaggaagaaccctcaggaaggcctgtacaatgaactgcagaaagataagatggcggaggcctacagtgagattgggatgaaaggcgagcgccggaggggcaaggggcacgatggcctttaccagggtctcagtacagccaccaaggacacctacgacgcccttcacatgcaggccctgccccctcgctctagtggctccggcgagggcagaggaagtctactaacctgcggagatgtggaagaaaatcctggcccacatatgaccgagtacaagcccacggtgcgcctcgccacccgcgacgacgtccccagggccgtacgcaccctcgccgccgcgttcgccgactaccccgccacgcgccacaccgtcgatccggaccgccacatcgagcgggtcaccgagctgcaagaactcttcctcacgcgcgtcgggctcgacatcggcaaggtgtgggtcgcggacgacggcgccgcggtggcggtctggaccacgccggagagcgtcgaagcgggggcggtgttcgccgagatcggcccgcgcatggccgagttgagcggttcccggctggccgcgcagcaacagatggaaggcctcctggcgccgcaccggcccaaggagcccgcgtggttcctggccaccgtcggcgtctcgcccgaccaccagggcaagggtctgggcagcgccgtcgtgctccccggagtggaggcggccgagcgcgccggggtgcccgccttcctggagacctccgcgccccgcaacctccccttctacgagcggctcggcttcaccgtcaccgccgacgtcgaggtgcccgaaggaccgcgcacctggtgcatgacccgcaagcccggtgcctga

SEQ ID NO: 1677 - DNA, 2169 bp, Artificial Sequence
  Synthetic Polynucleotides
atggccttaccagtgaccgccttgctcctgccgctggccttgctgctccacgccgccaggccggacatccagatgacacagagccctagcagcctgtctgccagcgtgggagacagagtgaccatcacctgtagagccagccagggcatctcttcttggctggcctggtatcagcagaagcccgagaaggcccctaagagcctgatctatgccgccagctctctccagagcggagtgcctagcagattttctggcagcggctccggcaccgatttcaccctgacaatatccagcctccagcctgaggacttcgccacctactactgccagcagtacaacagctacccctacaccttcggccagggcaccaagctggaaatcaaaggcggaggcggaagtggaggcggaggatctggcggcggaggctctcaagtgcaactggttcagagcggcgctgaagtgaagaaacctggggcctctgtgaaggtgtcctgcaaggcttccggctacacctttaccagctacgacgtgcactgggtccgacaggctccaggacaaagactggaatggatgggatggctgcacgccgataccggcatcaccaagttcagccagaaattccagggccgcgtgacaatcaccagagacacatctgccagcaccgcctacatggaactgagcagcctgagaagcgaggacaccgccgtgtactactgcgccagagagagaatccagctttggttcgactactggggccagggaaccctggtcacagtctcttctacgcgtgagcagaaactgatctcggaagaggatctggcgaagcccaccacgacgccagcgccgcgaccaccaacaccggcgcccaccatcgcgtcgcagcccctgtccctgcgcccagaggcgtgccggccagcggcggggggcgcagtgcacacgagggggctggacttcgcctgtgacatctacatctgggcgcccttggccgggacttgtggggtccttctcctgtcactggttatcaccctttactgcaaacggggcagaaagaaactcctgtatatattcaaacaaccatttatgagaccagtacaaactactcaagaggaagatggctgtagctgccgatttccagaagaagaagaaggaggatgtgaactgagagtgaagttcagcaggagcgcagacgcccccgcgtaccagcagggccagaaccagctctataacgagctgaatctaggacgaagagaggagtacgatgttttggacaagagacgtggccgggaccctgagatggggggaaagccgagaaggaagaaccctcaggaaggcctgtacaatgaactgcagaaagataagatggcggaggcctacagtgagattgggatgaaaggcgagcgccggaggggcaaggggcacgatggcctttaccagggtctcagtacagccaccaaggacacctacgacgcccttcacatgcaggccctgccccctcgctctagtggctccggcgagggcagaggaagtctactaacctgcggagatgtggaagaaaatcctggcccacatatgaccgagtacaagcccacggtgcgcctcgccacccgcgacgacgtccccagggccgtacgcaccctcgccgccgcgttcgccgactaccccgccacgcgccacaccgtcgatccggaccgccacatcgagcgggtcaccgagctgcaagaactcttcctcacgcgcgtcgggctcgacatcggcaaggtgtgggtcgcggacgacggcgccgcggtggcggtctggaccacgccggagagcgtcgaagcgggggcggtgttcgccgagatcggcccgcgcatggccgagttgagcggttcccggctggccgcgcagcaacagatggaaggcctcctggcgccgcaccggcccaaggagcccgcgtggttcctggccaccgtcggcgtctcgcccgaccaccagggcaagggtctgggcagcgccgtcgtgctccccggagtggaggcggccgagcgcgccggggtgcccgccttcctggagacctccgcgccccgcaacctccccttctacgagcggctcggcttcaccgtcaccgccgacgtcgaggtgcccgaaggaccgcgcacctggtgcatgacccgcaagcccggtgcctga

SEQ ID NO: 1678 - DNA, 2226 bp, Artificial Sequence
  Synthetic Polynucleotides
atggccttaccagtgaccgccttgctcctgccgctggccttgctgctccacgccgccaggccggacgacatcgtgatgacccagagccccctgagcctgcctgtgacacctggcgagcctgccagcatctcctgtagaagcagccagagcctgctgcacagcaacggctacaactacctcgtgtggtatctccagaagcccggccagagccctcaactgctgatctacctgggcagcatcagagccagcggcgtgcccgatagattttccggcagcggctccggcaccgacttcaccctgaagatcagccgggtggaagccgaggacgtgggcgtgtactactgtatgcagcccctccagacccccatcaccttcggccagggcaccagactggaaatcaagagaggcggaggcggaagtggaggcggaggatctggcggcggaggctctggactccagtgtgtggccgctcctagatgggtgctgagccaggtgcaactccagcagtggggagccggactgctgaagcctagcgagacactgagcctgacatgcgccgtgtacggcggcagcttcagcggcaattactggtcctggatcagacagccccctggcaagggcctggaatggatcggcgagatcaaccacagcggcagcaccaactacaaccccagcctgaagtccagagtgaccatcagcgtggacaccagcaagaaccagttctccctgaagctgagcagcgtgacagccgccgacaccgccgtgtattactgtgccagaggcggctcctacaattacttcgactactggggccagggaaccctcgtgaccgtgtctagtacgcgtgagcagaaactgatctcggaagaggatctggcgaagcccaccacgacgccagcgccgcgaccaccaacaccggcgcccaccatcgcgtcgcagcccctgtccctgcgcccagaggcgtgccggccagcggcggggggcgcagtgcacacgagggggctggacttcgcctgtgacatctacatctgggcgcccttggccgggacttgtggggtccttctcctgtcactggttatcaccctttactgcaaacggggcagaaagaaactcctgtatatattcaaacaaccatttatgagaccagtacaaactactcaagaggaagatggctgtagctgccgatttccagaagaagaagaaggaggatgtgaactgagagtgaagttcagcaggagcgcagacgcccccgcgtaccagcagggccagaaccagctctataacgagctgaatctaggacgaagagaggagtacgatgttttggacaagagacgtggccgggaccctgagatggggggaaagccgagaaggaagaaccctcaggaaggcctgtacaatgaactgcagaaagataagatggcggaggcctacagtgagattgggatgaaaggcgagcgccggaggggcaaggggcacgatggcctttaccagggtctcagtacagccaccaaggacacctacgacgcccttcacatgcaggccctgccccctcgctctagtggctccggcgagggcagaggaagtctactaacctgcggagatgtggaagaaaatcctggcccacatatgaccgagtacaagcccacggtgcgcctcgccacccgcgacgacgtccccagggccgtacgcaccctcgccgccgcgttcgccgactaccccgccacgcgccacaccgtcgatccggaccgccacatcgagcgggtcaccgagctgcaagaactcttcctcacgcgcgtcgggctcgacatcggcaaggtgtgggtcgcggacgacggcgccgcggtggcggtctggaccacgccggagagcgtcgaagcgggggcggtgttcgccgagatcggcccgcgcatggccgagttgagcggttcccggctggccgcgcagcaacagatggaaggcctcctggcgccgcaccggcccaaggagcccgcgtggttcctggccaccgtcggcgtctcgcccgaccaccagggcaagggtctgggcagcgccgtcgtgctccccggagtggaggcggccgagcgcgccggggtgcccgccttcctggagacctccgcgccccgcaacctccccttctacgagcggctcggcttcaccgtcaccgccgacgtcgaggtgcccgaaggaccgcgcacctggtgcatgacccgcaagcccggtgcctga

SEQ ID NO: 1679 - DNA, 2217 bp, Artificial Sequence
  Synthetic Polynucleotides
atggccttaccagtgaccgccttgctcctgccgctggccttgctgctccacgccgccaggccggaccagctgacacagagccctagcagcgtgtcagccagcgtgggcgacagagtgaccatcacctgtagagccagccggggcatcagctcttggctggcctggtatcagcagaagcccggcaaggcccccaagctgctgatctacacagccagcagcctccagagcggcgtgcccagcagattttctggcagcggctccggcaccgacttcaccctgacaatcagcagcctccagcccgaggacttcgccacctactactgccagcaggcttacagcttcccccggacctttggccagggcaccaaggtggaaatcaagcggggcggaggcggaagtggaggcggaggatctggcggcggaggctctgtggctgctcctagatgggtgctgagccaggtgcagctccaggaatctggccccggactcgtgaagcctagccagaccctgagcctgacctgtaccgtgtctggcggcagcatcagcagcggcggctactactggatctggatcagacagcaccctggcaagggcctggaatggatcggctacatctactacaacggcaacacctactataaccccagcctgaagtcccgcgtgaccatgagcgtggacaccagcaagaaccagttctccctgaagctgtccagcgtgacagccgccgataccgccgtgtactactgcgccagagatggcatcaccatgatccggggctactattacggcatggacgtgtggggccagggaaccaccgtgaccgtgtcatctacgcgtgagcagaaactgatctcggaagaggatctggcgaagcccaccacgacgccagcgccgcgaccaccaacaccggcgcccaccatcgcgtcgcagcccctgtccctgcgcccagaggcgtgccggccagcggcggggggcgcagtgcacacgagggggctggacttcgcctgtgacatctacatctgggcgcccttggccgggacttgtggggtccttctcctgtcactggttatcaccctttactgcaaacggggcagaaagaaactcctgtatatattcaaacaaccatttatgagaccagtacaaactactcaagaggaagatggctgtagctgccgatttccagaagaagaagaaggaggatgtgaactgagagtgaagttcagcaggagcgcagacgcccccgcgtaccagcagggccagaaccagctctataacgagctgaatctaggacgaagagaggagtacgatgttttggacaagagacgtggccgggaccctgagatggggggaaagccgagaaggaagaaccctcaggaaggcctgtacaatgaactgcagaaagataagatggcggaggcctacagtgagattgggatgaaaggcgagcgccggaggggcaaggggcacgatggcctttaccagggtctcagtacagccaccaaggacacctacgacgcccttcacatgcaggccctgccccctcgctctagtggctccggcgagggcagaggaagtctactaacctgcggagatgtggaagaaaatcctggcccacatatgaccgagtacaagcccacggtgcgcctcgccacccgcgacgacgtccccagggccgtacgcaccctcgccgccgcgttcgccgactaccccgccacgcgccacaccgtcgatccggaccgccacatcgagcgggtcaccgagctgcaagaactcttcctcacgcgcgtcgggctcgacatcggcaaggtgtgggtcgcggacgacggcgccgcggtggcggtctggaccacgccggagagcgtcgaagcgggggcggtgttcgccgagatcggcccgcgcatggccgagttgagcggttcccggctggccgcgcagcaacagatggaaggcctcctggcgccgcaccggcccaaggagcccgcgtggttcctggccaccgtcggcgtctcgcccgaccaccagggcaagggtctgggcagcgccgtcgtgctccccggagtggaggcggccgagcgcgccggggtgcccgccttcctggagacctccgcgccccgcaacctccccttctacgagcggctcggcttcaccgtcaccgccgacgtcgaggtgcccgaaggaccgcgcacctggtgcatgacccgcaagcccggtgcctga

SEQ ID NO: 1680 - DNA, 2139 bp, Artificial Sequence
  Synthetic Polynucleotides
atggccttaccagtgaccgccttgctcctgccgctggccttgctgctccacgccgccaggccggacatcgtcgtgacacagagccctgcttccctggccgtgtccctgggacagagagccaccatcagctaccgggccagcaagagcgtgtccaccagcggctacagctacatgcactggaaccagcagaagcccggccagccccctagactgctgatctacctggtgtccaacctggaaagcggcgtgcccgccagattttctggcagcggctctggcaccgacttcaccctgaacatccaccccgtggaagaagaggacgccgccacctactactgccagcacatcagagagctgaccagaagcgagggcggaccctcttggaagggcggaggcggaagtggaggcggaggatctggcggcggaggctctgaagtgaagctggaagagtctggcggcgaccttgtgaagcctggcggcagcctgaagctgagctgtgccgccagcggctttaccttctccggctacggcatgagctgggtgcgccagacccccgacaagagactggaatgggtggcaaccatcagcagcggcggcagctacacctactatcccgacagcgtgaagggccggttcaccatctccagagacaacgccaagaacaccctgtacctgcagatgtcctccctgaagtccgaggacaccgccatgtactattgcgccaggcacgaaggcggctactacggcagttctacgcgtgagcagaaactgatctcggaagaggatctggcgaagcccaccacgacgccagcgccgcgaccaccaacaccggcgcccaccatcgcgtcgcagcccctgtccctgcgcccagaggcgtgccggccagcggcggggggcgcagtgcacacgagggggctggacttcgcctgtgacatctacatctgggcgcccttggccgggacttgtggggtccttctcctgtcactggttatcaccctttactgcaaacggggcagaaagaaactcctgtatatattcaaacaaccatttatgagaccagtacaaactactcaagaggaagatggctgtagctgccgatttccagaagaagaagaaggaggatgtgaactgagagtgaagttcagcaggagcgcagacgcccccgcgtaccagcagggccagaaccagctctataacgagctgaatctaggacgaagagaggagtacgatgttttggacaagagacgtggccgggaccctgagatggggggaaagccgagaaggaagaaccctcaggaaggcctgtacaatgaactgcagaaagataagatggcggaggcctacagtgagattgggatgaaaggcgagcgccggaggggcaaggggcacgatggcctttaccagggtctcagtacagccaccaaggacacctacgacgcccttcacatgcaggccctgccccctcgctctagtggctccggcgagggcagaggaagtctactaacctgcggagatgtggaagaaaatcctggcccacatatgaccgagtacaagcccacggtgcgcctcgccacccgcgacgacgtccccagggccgtacgcaccctcgccgccgcgttcgccgactaccccgccacgcgccacaccgtcgatccggaccgccacatcgagcgggtcaccgagctgcaagaactcttcctcacgcgcgtcgggctcgacatcggcaaggtgtgggtcgcggacgacggcgccgcggtggcggtctggaccacgccggagagcgtcgaagcgggggcggtgttcgccgagatcggcccgcgcatggccgagttgagcggttcccggctggccgcgcagcaacagatggaaggcctcctggcgccgcaccggcccaaggagcccgcgtggttcctggccaccgtcggcgtctcgcccgaccaccagggcaagggtctgggcagcgccgtcgtgctccccggagtggaggcggccgagcgcgccggggtgcccgccttcctggagacctccgcgccccgcaacctccccttctacgagcggctcggcttcaccgtcaccgccgacgtcgaggtgcccgaaggaccgcgcacctggtgcatgacccgcaagcccggtgcctga

SEQ ID NO: 1681 - DNA, 2187 bp, Artificial Sequence
  Synthetic Polynucleotides
atggccttaccagtgaccgccttgctcctgccgctggccttgctgctccacgccgccaggccggacgacatccagatgacccagagccccagcagcctgtctgccagcgtgggcgacagagtgaccatcacctgtagagccagccagggcatcagcaactacctggcctggtatcagcagaaaaccggcaaggtgcccaagttcctgatctacgaggccagcaccctgcagagcggcgtgccaagtagattttccggcggaggcagcggcaccgacttcaccctgacaatcagctccctgcagcccgaggacgtggcaacctactactgccagaactacaacagcgcccccttcaccttcggccctgggaccaaggtggacatcaagggcggaggcggaagtggaggcggaggatctggcggcggaggctctcaggtgcaactggtggaatctggcggaggcgtggtgcagcctggcagaagcctgagactgagctgtgccgccagcggcttcgccttcagcagatacggaatgcactgggtgcgccaggcccctggcaaaggactggaatgggtggccgtgatttggtacgacggcagcaacaagtactacgccgacagcgtgaagggccggttcaccatcagccgggacaacagcaagaacacccagtacctgcagatgaacagcctgcgggccgaggataccgccgtgtactattgtgccagaggcggcgacttcctgtactactactattacggcatggacgtgtggggccagggaaccaccgtgaccgtgtcatctacgcgtgagcagaaactgatctcggaagaggatctggcgaagcccaccacgacgccagcgccgcgaccaccaacaccggcgcccaccatcgcgtcgcagcccctgtccctgcgcccagaggcgtgccggccagcggcggggggcgcagtgcacacgagggggctggacttcgcctgtgacatctacatctgggcgcccttggccgggacttgtggggtccttctcctgtcactggttatcaccctttactgcaaacggggcagaaagaaactcctgtatatattcaaacaaccatttatgagaccagtacaaactactcaagaggaagatggctgtagctgccgatttccagaagaagaagaaggaggatgtgaactgagagtgaagttcagcaggagcgcagacgcccccgcgtaccagcagggccagaaccagctctataacgagctgaatctaggacgaagagaggagtacgatgttttggacaagagacgtggccgggaccctgagatggggggaaagccgagaaggaagaaccctcaggaaggcctgtacaatgaactgcagaaagataagatggcggaggcctacagtgagattgggatgaaaggcgagcgccggaggggcaaggggcacgatggcctttaccagggtctcagtacagccaccaaggacacctacgacgcccttcacatgcaggccctgccccctcgctctagtggctccggcgagggcagaggaagtctactaacctgcggagatgtggaagaaaatcctggcccacatatgaccgagtacaagcccacggtgcgcctcgccacccgcgacgacgtccccagggccgtacgcaccctcgccgccgcgttcgccgactaccccgccacgcgccacaccgtcgatccggaccgccacatcgagcgggtcaccgagctgcaagaactcttcctcacgcgcgtcgggctcgacatcggcaaggtgtgggtcgcggacgacggcgccgcggtggcggtctggaccacgccggagagcgtcgaagcgggggcggtgttcgccgagatcggcccgcgcatggccgagttgagcggttcccggctggccgcgcagcaacagatggaaggcctcctggcgccgcaccggcccaaggagcccgcgtggttcctggccaccgtcggcgtctcgcccgaccaccagggcaagggtctgggcagcgccgtcgtgctccccggagtggaggcggccgagcgcgccggggtgcccgccttcctggagacctccgcgccccgcaacctccccttctacgagcggctcggcttcaccgtcaccgccgacgtcgaggtgcccgaaggaccgcgcacctggtgcatgacccgcaagcccggtgcctga

SEQ ID NO: 1682 - DNA, 2160 bp, Artificial Sequence
  Synthetic Polynucleotides
atggccttaccagtgaccgccttgctcctgccgctggccttgctgctccacgccgccaggccggacatccagatgacccagagccccagcagcctgtctaccagcgtgggcgatagagtgaccctgacctgcaaggccagccaggatgtgggaaccgccgtggactggtatcagcagaagcctggccccagccccaagctgctgatctactgggccagcaccagacacaccggcatccccagcagattttccggcagcggctccggcaccgacttcaccctgacaatcagctccctgcagcccgaggacttcgccgactactactgccagcagtacaacagctaccccctgaccttcggccctgggaccaaggtggacatcaagggcggaggcggaagtggaggcggaggatctggcggcggaggctctgaagtgcaactggtgcagagcggccctgaagtgaagaaacccggcgctaccgtgaagattagctgcaagaccagcggctacaccttcaccgagtacaccatccactgggtcaagcaggcccctggcaagggcctggaatggatcggcaacatcaaccccaacaacggcggcaccacctacaaccagaagttcgaggacaaggccaccctgaccgtggacaagagcaccgacaccgcctacatggaactgagcagcctgcggagcgaggataccgccgtgtactattgtgccgccggatggaacttcgactactggggacagggcaccctgctgaccgtgtctagtacgcgtgagcagaaactgatctcggaagaggatctggcgaagcccaccacgacgccagcgccgcgaccaccaacaccggcgcccaccatcgcgtcgcagcccctgtccctgcgcccagaggcgtgccggccagcggcggggggcgcagtgcacacgagggggctggacttcgcctgtgacatctacatctgggcgcccttggccgggacttgtggggtccttctcctgtcactggttatcaccctttactgcaaacggggcagaaagaaactcctgtatatattcaaacaaccatttatgagaccagtacaaactactcaagaggaagatggctgtagctgccgatttccagaagaagaagaaggaggatgtgaactgagagtgaagttcagcaggagcgcagacgcccccgcgtaccagcagggccagaaccagctctataacgagctgaatctaggacgaagagaggagtacgatgttttggacaagagacgtggccgggaccctgagatggggggaaagccgagaaggaagaaccctcaggaaggcctgtacaatgaactgcagaaagataagatggcggaggcctacagtgagattgggatgaaaggcgagcgccggaggggcaaggggcacgatggcctttaccagggtctcagtacagccaccaaggacacctacgacgcccttcacatgcaggccctgccccctcgctctagtggctccggcgagggcagaggaagtctactaacctgcggagatgtggaagaaaatcctggcccacatatgaccgagtacaagcccacggtgcgcctcgccacccgcgacgacgtccccagggccgtacgcaccctcgccgccgcgttcgccgactaccccgccacgcgccacaccgtcgatccggaccgccacatcgagcgggtcaccgagctgcaagaactcttcctcacgcgcgtcgggctcgacatcggcaaggtgtgggtcgcggacgacggcgccgcggtggcggtctggaccacgccggagagcgtcgaagcgggggcggtgttcgccgagatcggcccgcgcatggccgagttgagcggttcccggctggccgcgcagcaacagatggaaggcctcctggcgccgcaccggcccaaggagcccgcgtggttcctggccaccgtcggcgtctcgcccgaccaccagggcaagggtctgggcagcgccgtcgtgctccccggagtggaggcggccgagcgcgccggggtgcccgccttcctggagacctccgcgccccgcaacctccccttctacgagcggctcggcttcaccgtcaccgccgacgtcgaggtgcccgaaggaccgcgcacctggtgcatgacccgcaagcccggtgcctga

SEQ ID NO: 1683 - DNA, 2163 bp, Artificial Sequence
  Synthetic Polynucleotides
atggccttaccagtgaccgccttgctcctgccgctggccttgctgctccacgccgccaggccggacatccagatgacccagagccccagcagcctgtctgccagcgtgggcgacagagtgaccatcacatgcaaggccagccaggacatctacccctacctgaactggttccagcagaagcccggcaaggcccccaagaccctgatctaccggaccaacagactgctggacggcgtgcccagcagattttctggcagcggctccggcaccgacttcaccttcaccatcagctccctccagccctactactgcctccagtacgacgagttccccctgacctttggagccggcaccaagctggaaatcaagagaggcggaggcggaagtggaggcggaggatctggcggcggaggctctcagatcaccctgaaagagtccggccccaccctcgtgaagcctacccagaccctgacactgacctgcaccttcagcggcttcagcctgagcaccagcaacatgggcgtgggctggatcagacagcctcccggaaaagccctggaatggctggcccacatttggtgggacgacgacaagtactacagccccagcctgaagtcccggctgacaatcaccaaggacaccagcaagaaccaggtggtgctgaccatgaccaacatggaccccgtggacaccgccacctactattgcgtgcggagcaactacggctacgcttggtttgcctactggggccagggcaccctcgtgaccgtgtcatctacgcgtgagcagaaactgatctcggaagaggatctggcgaagcccaccacgacgccagcgccgcgaccaccaacaccggcgcccaccatcgcgtcgcagcccctgtccctgcgcccagaggcgtgccggccagcggcggggggcgcagtgcacacgagggggctggacttcgcctgtgacatctacatctgggcgcccttggccgggacttgtggggtccttctcctgtcactggttatcaccctttactgcaaacggggcagaaagaaactcctgtatatattcaaacaaccatttatgagaccagtacaaactactcaagaggaagatggctgtagctgccgatttccagaagaagaagaaggaggatgtgaactgagagtgaagttcagcaggagcgcagacgcccccgcgtaccagcagggccagaaccagctctataacgagctgaatctaggacgaagagaggagtacgatgttttggacaagagacgtggccgggaccctgagatggggggaaagccgagaaggaagaaccctcaggaaggcctgtacaatgaactgcagaaagataagatggcggaggcctacagtgagattgggatgaaaggcgagcgccggaggggcaaggggcacgatggcctttaccagggtctcagtacagccaccaaggacacctacgacgcccttcacatgcaggccctgccccctcgctctagtggctccggcgagggcagaggaagtctactaacctgcggagatgtggaagaaaatcctggcccacatatgaccgagtacaagcccacggtgcgcctcgccacccgcgacgacgtccccagggccgtacgcaccctcgccgccgcgttcgccgactaccccgccacgcgccacaccgtcgatccggaccgccacatcgagcgggtcaccgagctgcaagaactcttcctcacgcgcgtcgggctcgacatcggcaaggtgtgggtcgcggacgacggcgccgcggtggcggtctggaccacgccggagagcgtcgaagcgggggcggtgttcgccgagatcggcccgcgcatggccgagttgagcggttcccggctggccgcgcagcaacagatggaaggcctcctggcgccgcaccggcccaaggagcccgcgtggttcctggccaccgtcggcgtctcgcccgaccaccagggcaagggtctgggcagcgccgtcgtgctccccggagtggaggcggccgagcgcgccggggtgcccgccttcctggagacctccgcgccccgcaacctccccttctacgagcggctcggcttcaccgtcaccgccgacgtcgaggtgcccgaaggaccgcgcacctggtgcatgacccgcaagcccggtgcctga

SEQ ID NO: 1684 - DNA, 2163 bp, Artificial Sequence
  Synthetic Polynucleotides
atggccttaccagtgaccgccttgctcctgccgctggccttgctgctccacgccgccaggccggacatcgtgatgacccagagccagaaattcatgagcaccagcgtgggcgacagagtgaacgtgacctgcaaggccagccagaacgtgggcaccaacgtcgtgtggtatcagcagaaaaccggccagagccccaaggccctgatccacagcgccagctacagatacagcggcgtgcccgacagattcaccggcagcggctctggcaccgacttcaccctgaccctgagcaacgtgcagagcgaggacctggccgaatacttctgccagcactacaacagcttcccttacaccttcggcggaggcaccaagctggaaatcaagagaggcggaggcggaagtggaggcggaggatctggcggcggaggctctcaggtgcaactccagcagagcggagccgaactcgtgcggcctggcgtgtccgtgaagattagctgcaagggctccggctacaggttcaccgactaccccatccactgggtcaagcagagccacgccaagagcctggaatggatcggcatcatcagcacctactacggcgacgtgaccaacaaccccaagttccggggcaaggccaccatgacagtggacaagagcagcaccaccgcctacatggaactggcccggctgaccagcgaggactccgccatctactactgcgcccggaacgacctgttcgcctattggggccagggcaccctcgtgacagtgtctgctacgcgtgagcagaaactgatctcggaagaggatctggcgaagcccaccacgacgccagcgccgcgaccaccaacaccggcgcccaccatcgcgtcgcagcccctgtccctgcgcccagaggcgtgccggccagcggcggggggcgcagtgcacacgagggggctggacttcgcctgtgacatctacatctgggcgcccttggccgggacttgtggggtccttctcctgtcactggttatcaccctttactgcaaacggggcagaaagaaactcctgtatatattcaaacaaccatttatgagaccagtacaaactactcaagaggaagatggctgtagctgccgatttccagaagaagaagaaggaggatgtgaactgagagtgaagttcagcaggagcgcagacgcccccgcgtaccagcagggccagaaccagctctataacgagctgaatctaggacgaagagaggagtacgatgttttggacaagagacgtggccgggaccctgagatggggggaaagccgagaaggaagaaccctcaggaaggcctgtacaatgaactgcagaaagataagatggcggaggcctacagtgagattgggatgaaaggcgagcgccggaggggcaaggggcacgatggcctttaccagggtctcagtacagccaccaaggacacctacgacgcccttcacatgcaggccctgccccctcgctctagtggctccggcgagggcagaggaagtctactaacctgcggagatgtggaagaaaatcctggcccacatatgaccgagtacaagcccacggtgcgcctcgccacccgcgacgacgtccccagggccgtacgcaccctcgccgccgcgttcgccgactaccccgccacgcgccacaccgtcgatccggaccgccacatcgagcgggtcaccgagctgcaagaactcttcctcacgcgcgtcgggctcgacatcggcaaggtgtgggtcgcggacgacggcgccgcggtggcggtctggaccacgccggagagcgtcgaagcgggggcggtgttcgccgagatcggcccgcgcatggccgagttgagcggttcccggctggccgcgcagcaacagatggaaggcctcctggcgccgcaccggcccaaggagcccgcgtggttcctggccaccgtcggcgtctcgcccgaccaccagggcaagggtctgggcagcgccgtcgtgctccccggagtggaggcggccgagcgcgccggggtgcccgccttcctggagacctccgcgccccgcaacctccccttctacgagcggctcggcttcaccgtcaccgccgacgtcgaggtgcccgaaggaccgcgcacctggtgcatgacccgcaagcccggtgcctga

SEQ ID NO: 1685 - DNA, 2172 bp, Artificial Sequence
  Synthetic Polynucleotides
atggccttaccagtgaccgccttgctcctgccgctggccttgctgctccacgccgccaggccggacatcaagatgacccagagccccagctctatgtacgccagcctgggcgagcgcgtgaccatcacctgtaaagccagccccgacatcaacagctacctgagctggttccagcagaagcccggcaagagccccaagaccctgatctaccgggccaacagactggtggatggcgtgcccagcagattctctggcggcggaagcggccaggactacagcctgaccatcaactccctggaatacgaggacatgggcatctactactgcctccagtacgacgagttcccctacaccttcggcggaggcaccaagctggaaatgaaaggcggaggcggaagtggaggcggaggatctggcggcggaggctctgaagtgaagctggtggaatcaggaggaggcctcgtgaaacctggcggctctctgaagctgagctgtgccgccagcggcttcaccttcagcagctacgccatgagctgggtgcgccagattcccgagaagcggctggaatgggtggcctccattagcagaggcggcaccacctactaccccgacagcgtgaagggccggttcaccatctccagagacaacgtgcggaacatcctgtacctccagatgagcagcctgcggagcgaggacaccgccatgtactactgcggcagatacgactacgacggctactacgctatggactactggggccagggcaccagcgtgaccgtgtcatctacgcgtgagcagaaactgatctcggaagaggatctggcgaagcccaccacgacgccagcgccgcgaccaccaacaccggcgcccaccatcgcgtcgcagcccctgtccctgcgcccagaggcgtgccggccagcggcggggggcgcagtgcacacgagggggctggacttcgcctgtgacatctacatctgggcgcccttggccgggacttgtggggtccttctcctgtcactggttatcaccctttactgcaaacggggcagaaagaaactcctgtatatattcaaacaaccatttatgagaccagtacaaactactcaagaggaagatggctgtagctgccgatttccagaagaagaagaaggaggatgtgaactgagagtgaagttcagcaggagcgcagacgcccccgcgtaccagcagggccagaaccagctctataacgagctgaatctaggacgaagagaggagtacgatgttttggacaagagacgtggccgggaccctgagatggggggaaagccgagaaggaagaaccctcaggaaggcctgtacaatgaactgcagaaagataagatggcggaggcctacagtgagattgggatgaaaggcgagcgccggaggggcaaggggcacgatggcctttaccagggtctcagtacagccaccaaggacacctacgacgcccttcacatgcaggccctgccccctcgctctagtggctccggcgagggcagaggaagtctactaacctgcggagatgtggaagaaaatcctggcccacatatgaccgagtacaagcccacggtgcgcctcgccacccgcgacgacgtccccagggccgtacgcaccctcgccgccgcgttcgccgactaccccgccacgcgccacaccgtcgatccggaccgccacatcgagcgggtcaccgagctgcaagaactcttcctcacgcgcgtcgggctcgacatcggcaaggtgtgggtcgcggacgacggcgccgcggtggcggtctggaccacgccggagagcgtcgaagcgggggcggtgttcgccgagatcggcccgcgcatggccgagttgagcggttcccggctggccgcgcagcaacagatggaaggcctcctggcgccgcaccggcccaaggagcccgcgtggttcctggccaccgtcggcgtctcgcccgaccaccagggcaagggtctgggcagcgccgtcgtgctccccggagtggaggcggccgagcgcgccggggtgcccgccttcctggagacctccgcgccccgcaacctccccttctacgagcggctcggcttcaccgtcaccgccgacgtcgaggtgcccgaaggaccgcgcacctggtgcatgacccgcaagcccggtgcctga

SEQ ID NO: 1686 - DNA, 2181 bp, Artificial Sequence
  Synthetic Polynucleotides
atggccttaccagtgaccgccttgctcctgccgctggccttgctgctccacgccgccaggccggacgacgtggtcgtgacccctgtgtcctgcttcctgagctgcatctctggcgccgagggccaccacctgattcagggccagcagaagtgccagtacatctggctgctgtacgccctggaacccaccgagacaagaaccgccacccagacccctcacctgtcctgcatccagcccagaatctggggaccctgccaggtgcagtggcagtgggtgtgggatagactgcacccccagcaccctagttgtggcggcggaggctgttgcaacctgctgctgtctgcccacggcgcctacacatttggcggaggcacccggctggaactgaaaggcggaggcggaagtggaggcggaggatctggcggcggaggctctgaagtgaagctccaggaaagcggccctgagctcgtgaagcctggcgcctctgtgaagatgagctgcaaggccagcggctacaccttcaccagctacgtgatgcactgggtcaagcagaagcccggccagggcctggaatggatcggctacatcaacccctacaacgacggcaccaagtacaacgagaagttcaagggcaaggccaccctgaccagcgacaagagcagcagcaccgcctacatggaactgagcagcctgacctccgaggacagcgccgtgtactactgcgcccggtggaaaatctactacggcaactacgaggactactggggccagggcacacccctgacagtgtctagtacgcgtgagcagaaactgatctcggaagaggatctggcgaagcccaccacgacgccagcgccgcgaccaccaacaccggcgcccaccatcgcgtcgcagcccctgtccctgcgcccagaggcgtgccggccagcggcggggggcgcagtgcacacgagggggctggacttcgcctgtgacatctacatctgggcgcccttggccgggacttgtggggtccttctcctgtcactggttatcaccctttactgcaaacggggcagaaagaaactcctgtatatattcaaacaaccatttatgagaccagtacaaactactcaagaggaagatggctgtagctgccgatttccagaagaagaagaaggaggatgtgaactgagagtgaagttcagcaggagcgcagacgcccccgcgtaccagcagggccagaaccagctctataacgagctgaatctaggacgaagagaggagtacgatgttttggacaagagacgtggccgggaccctgagatggggggaaagccgagaaggaagaaccctcaggaaggcctgtacaatgaactgcagaaagataagatggcggaggcctacagtgagattgggatgaaaggcgagcgccggaggggcaaggggcacgatggcctttaccagggtctcagtacagccaccaaggacacctacgacgcccttcacatgcaggccctgccccctcgctctagtggctccggcgagggcagaggaagtctactaacctgcggagatgtggaagaaaatcctggcccacatatgaccgagtacaagcccacggtgcgcctcgccacccgcgacgacgtccccagggccgtacgcaccctcgccgccgcgttcgccgactaccccgccacgcgccacaccgtcgatccggaccgccacatcgagcgggtcaccgagctgcaagaactcttcctcacgcgcgtcgggctcgacatcggcaaggtgtgggtcgcggacgacggcgccgcggtggcggtctggaccacgccggagagcgtcgaagcgggggcggtgttcgccgagatcggcccgcgcatggccgagttgagcggttcccggctggccgcgcagcaacagatggaaggcctcctggcgccgcaccggcccaaggagcccgcgtggttcctggccaccgtcggcgtctcgcccgaccaccagggcaagggtctgggcagcgccgtcgtgctccccggagtggaggcggccgagcgcgccggggtgcccgccttcctggagacctccgcgccccgcaacctccccttctacgagcggctcggcttcaccgtcaccgccgacgtcgaggtgcccgaaggaccgcgcacctggtgcatgacccgcaagcccggtgcctga

SEQ ID NO: 1687 - DNA, 2271 bp, Artificial Sequence
  Synthetic Polynucleotides
atggccttaccagtgaccgccttgctcctgccgctggccttgctgctccacgccgccaggccggacgaattccaggtgcaactggtgcagtctggcggagggctggtgcagccagggggatctctgagactgagctgtgccgccagcgacttcgacttcgccgcctacgagatgagctgggtgcgccaggctcctggacagggactggaatgggtggccatcatcagccacgacggcatcgacaagtattacaccgacagcgtgaagggccggttcaccatcagccgggacaacagcaagaacaccctgtacctgcagatgaataccctgcgggccgaggacaccgccacctactattgcctgagactgggagccgtgggccagggcacacttgtgacagtgtctagcctcgagggaggaggcggctccgggggaggcggaagtggaggcggaggatctgggtctggaggaagcggatctggaggctcagggtcagggggctcaggcagtggaggcagcttcgaacaggtgcaactggtgcagagcggaggcggactggtgcagcctgggggcagtctgaggctgtcttgtgccgcctccgatttcgccttcgatgattacgagatgtcttgggtgcggcaggccccaggcaaagccctggaatggatcggcgacatcaaccacagcggcaccaccatctacaaccccagcctgaagtccagagtgaccatctccagagacaactccaagaatactctgtacctgcagatgaacacactgagagccgaagatacagccatctactactgcgccagaccccactacggcgactacagcgacgccttcgacatctggggccagggaaccatggtcaccgtgtcctctacgcgtgagcagaaactgatctcggaagaggatctggcgaagcccaccacgacgccagcgccgcgaccaccaacaccggcgcccaccatcgcgtcgcagcccctgtccctgcgcccagaggcgtgccggccagcggcggggggcgcagtgcacacgagggggctggacttcgcctgtgacatctacatctgggcgcccttggccgggacttgtggggtccttctcctgtcactggttatcaccctttactgcaaacggggcagaaagaaactcctgtatatattcaaacaaccatttatgagaccagtacaaactactcaagaggaagatggctgtagctgccgatttccagaagaagaagaaggaggatgtgaactgagagtgaagttcagcaggagcgcagacgcccccgcgtaccagcagggccagaaccagctctataacgagctgaatctaggacgaagagaggagtacgatgttttggacaagagacgtggccgggaccctgagatggggggaaagccgagaaggaagaaccctcaggaaggcctgtacaatgaactgcagaaagataagatggcggaggcctacagtgagattgggatgaaaggcgagcgccggaggggcaaggggcacgatggcctttaccagggtctcagtacagccaccaaggacacctacgacgcccttcacatgcaggccctgccccctcgctctagtggctccggcgagggcagaggaagtctactaacctgcggagatgtggaagaaaatcctggcccacatatgaccgagtacaagcccacggtgcgcctcgccacccgcgacgacgtccccagggccgtacgcaccctcgccgccgcgttcgccgactaccccgccacgcgccacaccgtcgatccggaccgccacatcgagcgggtcaccgagctgcaagaactcttcctcacgcgcgtcgggctcgacatcggcaaggtgtgggtcgcggacgacggcgccgcggtggcggtctggaccacgccggagagcgtcgaagcgggggcggtgttcgccgagatcggcccgcgcatggccgagttgagcggttcccggctggccgcgcagcaacagatggaaggcctcctggcgccgcaccggcccaaggagcccgcgtggttcctggccaccgtcggcgtctcgcccgaccaccagggcaagggtctgggcagcgccgtcgtgctccccggagtggaggcggccgagcgcgccggggtgcccgccttcctggagacctccgcgccccgcaacctccccttctacgagcggctcggcttcaccgtcaccgccgacgtcgaggtgcccgaaggaccgcgcacctggtgcatgacccgcaagcccggtgcctga

SEQ ID NO: 1688 - DNA, 2196 bp, Artificial Sequence
  Synthetic Polynucleotides
atggccttaccagtgaccgccttgctcctgccgctggccttgctgctccacgccgccaggccggagatcgtgatgacccagagccctgccaccctgtccgtgtctccaggcgaaagagccaccctgagctgtagagccagccagagcgtgtccagcaacctggcctggtatcagcagaagcccggccaggctccccggctgctgatctatggcgcttctaccagagccaccggcatccccgccagattttctggcagcggctccggcaccgacttcaccctgacaatcagctccctccagtccgtggacagcgccgtgtactactgccagcagtacaacaactggcccccctacaccttcggccagggcaccaagctggaaatcaagggcggaggcggaagtggaggcggaggatctggcggcggaggctctcaggtgcaactgctggaaagcggagggggcgtggtgcagcctggaagaagcctgagactgagctgtgccgccagcggcttcaccttcagcttctacggaatgcactgggtgcgccaggcccctggcaaaggactggaatgggtggccgccatcagctacgacggcagcaacaagtattacgccgacagcgtgaagggccggttcaccatcagccgggacaacagcaagaacaccctgtacctccagatgaacagcctgcgggccgaggacacagccgtgtattattgcgccaagcggcccaaccagttctactgctccgacggcagatgctacagcatcgactactggggccagggaaccctcgtgaccgtgtctagtacgcgtgagcagaaactgatctcggaagaggatctggcgaagcccaccacgacgccagcgccgcgaccaccaacaccggcgcccaccatcgcgtcgcagcccctgtccctgcgcccagaggcgtgccggccagcggcggggggcgcagtgcacacgagggggctggacttcgcctgtgacatctacatctgggcgcccttggccgggacttgtggggtccttctcctgtcactggttatcaccctttactgcaaacggggcagaaagaaactcctgtatatattcaaacaaccatttatgagaccagtacaaactactcaagaggaagatggctgtagctgccgatttccagaagaagaagaaggaggatgtgaactgagagtgaagttcagcaggagcgcagacgcccccgcgtaccagcagggccagaaccagctctataacgagctgaatctaggacgaagagaggagtacgatgttttggacaagagacgtggccgggaccctgagatggggggaaagccgagaaggaagaaccctcaggaaggcctgtacaatgaactgcagaaagataagatggcggaggcctacagtgagattgggatgaaaggcgagcgccggaggggcaaggggcacgatggcctttaccagggtctcagtacagccaccaaggacacctacgacgcccttcacatgcaggccctgccccctcgctctagtggctccggcgagggcagaggaagtctactaacctgcggagatgtggaagaaaatcctggcccacatatgaccgagtacaagcccacggtgcgcctcgccacccgcgacgacgtccccagggccgtacgcaccctcgccgccgcgttcgccgactaccccgccacgcgccacaccgtcgatccggaccgccacatcgagcgggtcaccgagctgcaagaactcttcctcacgcgcgtcgggctcgacatcggcaaggtgtgggtcgcggacgacggcgccgcggtggcggtctggaccacgccggagagcgtcgaagcgggggcggtgttcgccgagatcggcccgcgcatggccgagttgagcggttcccggctggccgcgcagcaacagatggaaggcctcctggcgccgcaccggcccaaggagcccgcgtggttcctggccaccgtcggcgtctcgcccgaccaccagggcaagggtctgggcagcgccgtcgtgctccccggagtggaggcggccgagcgcgccggggtgcccgccttcctggagacctccgcgccccgcaacctccccttctacgagcggctcggcttcaccgtcaccgccgacgtcgaggtgcccgaaggaccgcgcacctggtgcatgacccgcaagcccggtgcctga

SEQ ID NO: 1689 - DNA, 2184 bp, Artificial Sequence
  Synthetic Polynucleotides
atggccttaccagtgaccgccttgctcctgccgctggccttgctgctccacgccgccaggccgcagagcgtgctgacacagcctcctagtgcctctgccggcggaacacctggacagagagtgaccatctcctgctccggcagcagcagcaacatcggcagcaacttcgtgtactggtatcagcaactgcccggcaccgcccccaagctgctgatctacagaaacaaccagcggcccagcggcgtgcccgatagattctctggaagcagaagcggcaccagcgccagcctggctggactgagaagcgaggacgaggccgactactactgtgccgccgatagcctgggcggccactacgtgttcggcaccggaacaaaagtgctgggcggaggcggaagtggaggcggaggatctggcggcggaggctctcaggtgcaactggtggaatctggcggaggctctgtgcagcctggcagaagcctgagactgagctgtgaagcctccggcttcaccttcgaggcttacgccatgcactgggtgcgccagccacctggcaaaggactggaatgggtgtccagcatcaactggaacagcggcagaatcgcctacgccgacagcgtgaagggccggttcaccatcagccgggacaacgccagaaacagcctgtacctccagatgaacagcctgcggctggaagataccgccttctactactgcgccaaggacatccggcggttcagcacaggcggagccgagtttgagtattggggccagggcaccctcgtgaccgtgtctagtacgcgtgagcagaaactgatctcggaagaggatctggcgaagcccaccacgacgccagcgccgcgaccaccaacaccggcgcccaccatcgcgtcgcagcccctgtccctgcgcccagaggcgtgccggccagcggcggggggcgcagtgcacacgagggggctggacttcgcctgtgacatctacatctgggcgcccttggccgggacttgtggggtccttctcctgtcactggttatcaccctttactgcaaacggggcagaaagaaactcctgtatatattcaaacaaccatttatgagaccagtacaaactactcaagaggaagatggctgtagctgccgatttccagaagaagaagaaggaggatgtgaactgagagtgaagttcagcaggagcgcagacgcccccgcgtaccagcagggccagaaccagctctataacgagctgaatctaggacgaagagaggagtacgatgttttggacaagagacgtggccgggaccctgagatggggggaaagccgagaaggaagaaccctcaggaaggcctgtacaatgaactgcagaaagataagatggcggaggcctacagtgagattgggatgaaaggcgagcgccggaggggcaaggggcacgatggcctttaccagggtctcagtacagccaccaaggacacctacgacgcccttcacatgcaggccctgccccctcgctctagtggctccggcgagggcagaggaagtctactaacctgcggagatgtggaagaaaatcctggcccacatatgaccgagtacaagcccacggtgcgcctcgccacccgcgacgacgtccccagggccgtacgcaccctcgccgccgcgttcgccgactaccccgccacgcgccacaccgtcgatccggaccgccacatcgagcgggtcaccgagctgcaagaactcttcctcacgcgcgtcgggctcgacatcggcaaggtgtgggtcgcggacgacggcgccgcggtggcggtctggaccacgccggagagcgtcgaagcgggggcggtgttcgccgagatcggcccgcgcatggccgagttgagcggttcccggctggccgcgcagcaacagatggaaggcctcctggcgccgcaccggcccaaggagcccgcgtggttcctggccaccgtcggcgtctcgcccgaccaccagggcaagggtctgggcagcgccgtcgtgctccccggagtggaggcggccgagcgcgccggggtgcccgccttcctggagacctccgcgccccgcaacctccccttctacgagcggctcggcttcaccgtcaccgccgacgtcgaggtgcccgaaggaccgcgcacctggtgcatgacccgcaagcccggtgcctga

SEQ ID NO: 1690 - DNA, 2169 bp, Artificial Sequence
  Synthetic Polynucleotides
atggccttaccagtgaccgccttgctcctgccgctggccttgctgctccacgccgccaggccggagaacgtgctgacacagagccctgccatcatgagcgcttccccaggcgagaaagtgaccatgacatgtagcgccagcagcagcgtgtcctacatgcactggtatcagcagaagtccagcacaagccccaagctgtggatctacgacaccagcaaactggcctctggcgtgccaggcagattttctggcagcggcagcggaaacagctacagcctgacaatcagcagcatggaagccgaggacgtggcaacctactactgctttcaaggcagcggctaccctctgacctttggagccggaacaaagctggaactgaaaggcggaggcggaagtggaggcggaggatctggcggcggaggctctcaggtgcagctgaaagaatctggccctggactggtggcccctagccagtctctgagcatcacctgtaccgtgtccggcttcagcctgagttctcagggcgtgtactgggtccgacagcctcctggaaaaggactggaatggctgggagccatttgggctggcggcagcaccaattacaacagcgccctgatgagccggctgagcatctccaaggacaacagcaagagccaggtgttcctgaagatgaacagcctccagaccgacgacaccgccatgtactactgcgccagagtggatggctaccggggctacaacatggactattggggccagggcaccagcgtgacagtctcttctacgcgtgagcagaaactgatctcggaagaggatctggcgaagcccaccacgacgccagcgccgcgaccaccaacaccggcgcccaccatcgcgtcgcagcccctgtccctgcgcccagaggcgtgccggccagcggcggggggcgcagtgcacacgagggggctggacttcgcctgtgacatctacatctgggcgcccttggccgggacttgtggggtccttctcctgtcactggttatcaccctttactgcaaacggggcagaaagaaactcctgtatatattcaaacaaccatttatgagaccagtacaaactactcaagaggaagatggctgtagctgccgatttccagaagaagaagaaggaggatgtgaactgagagtgaagttcagcaggagcgcagacgcccccgcgtaccagcagggccagaaccagctctataacgagctgaatctaggacgaagagaggagtacgatgttttggacaagagacgtggccgggaccctgagatggggggaaagccgagaaggaagaaccctcaggaaggcctgtacaatgaactgcagaaagataagatggcggaggcctacagtgagattgggatgaaaggcgagcgccggaggggcaaggggcacgatggcctttaccagggtctcagtacagccaccaaggacacctacgacgcccttcacatgcaggccctgccccctcgctctagtggctccggcgagggcagaggaagtctactaacctgcggagatgtggaagaaaatcctggcccacatatgaccgagtacaagcccacggtgcgcctcgccacccgcgacgacgtccccagggccgtacgcaccctcgccgccgcgttcgccgactaccccgccacgcgccacaccgtcgatccggaccgccacatcgagcgggtcaccgagctgcaagaactcttcctcacgcgcgtcgggctcgacatcggcaaggtgtgggtcgcggacgacggcgccgcggtggcggtctggaccacgccggagagcgtcgaagcgggggcggtgttcgccgagatcggcccgcgcatggccgagttgagcggttcccggctggccgcgcagcaacagatggaaggcctcctggcgccgcaccggcccaaggagcccgcgtggttcctggccaccgtcggcgtctcgcccgaccaccagggcaagggtctgggcagcgccgtcgtgctccccggagtggaggcggccgagcgcgccggggtgcccgccttcctggagacctccgcgccccgcaacctccccttctacgagcggctcggcttcaccgtcaccgccgacgtcgaggtgcccgaaggaccgcgcacctggtgcatgacccgcaagcccggtgcctga

SEQ ID NO: 1691 - DNA, 2181 bp, Artificial Sequence
  Synthetic Polynucleotides
atggccttaccagtgaccgccttgctcctgccgctggccttgctgctccacgccgccaggccggacgacatccagatgacccagagccccagcagcctgtctgccagcgtgggcgacagagtgaccatcacctgtagagccagccagagcatcagcagctacctgaactggtatcagcagaagcccggcaaggcccccaaactgctgatctacgacgccagcaacctggaaaccggcgtgcccagcagattttccggcagcggctctggcaccgacttcaccttcaccatcagctccctccagcccgaggacattgccacctactactgccagcagtacgacaacctgcccctgacctttggcggaggcaccaaggtggacatcaagagaggcggaggcggaagtggaggcggaggatctggcggcggaggctctcaggtgcaactggtggaatctggcggcggagtggtgcagcctggcagaagcctgagactgagctgtgccgccagcggcttcacctttagcagctacgccatgcactgggtgcgccaggcccctggaaaaggcctggaatgggtggccgtgatctcctacgacggctccaacaagtattacgccgacagcgtgaagggccggttcaccatctccagagacaacagcaagaacaccctgtacctccagatgaacagcctgcgggccgaggacaccgccgtgtactattgtgccagggctcacaacagcagctcttggagcttcgactactggggccagggcaccctcgtgaccgtgtcatctacgcgtgagcagaaactgatctcggaagaggatctggcgaagcccaccacgacgccagcgccgcgaccaccaacaccggcgcccaccatcgcgtcgcagcccctgtccctgcgcccagaggcgtgccggccagcggcggggggcgcagtgcacacgagggggctggacttcgcctgtgacatctacatctgggcgcccttggccgggacttgtggggtccttctcctgtcactggttatcaccctttactgcaaacggggcagaaagaaactcctgtatatattcaaacaaccatttatgagaccagtacaaactactcaagaggaagatggctgtagctgccgatttccagaagaagaagaaggaggatgtgaactgagagtgaagttcagcaggagcgcagacgcccccgcgtaccagcagggccagaaccagctctataacgagctgaatctaggacgaagagaggagtacgatgttttggacaagagacgtggccgggaccctgagatggggggaaagccgagaaggaagaaccctcaggaaggcctgtacaatgaactgcagaaagataagatggcggaggcctacagtgagattgggatgaaaggcgagcgccggaggggcaaggggcacgatggcctttaccagggtctcagtacagccaccaaggacacctacgacgcccttcacatgcaggccctgccccctcgctctagtggctccggcgagggcagaggaagtctactaacctgcggagatgtggaagaaaatcctggcccacatatgaccgagtacaagcccacggtgcgcctcgccacccgcgacgacgtccccagggccgtacgcaccctcgccgccgcgttcgccgactaccccgccacgcgccacaccgtcgatccggaccgccacatcgagcgggtcaccgagctgcaagaactcttcctcacgcgcgtcgggctcgacatcggcaaggtgtgggtcgcggacgacggcgccgcggtggcggtctggaccacgccggagagcgtcgaagcgggggcggtgttcgccgagatcggcccgcgcatggccgagttgagcggttcccggctggccgcgcagcaacagatggaaggcctcctggcgccgcaccggcccaaggagcccgcgtggttcctggccaccgtcggcgtctcgcccgaccaccagggcaagggtctgggcagcgccgtcgtgctccccggagtggaggcggccgagcgcgccggggtgcccgccttcctggagacctccgcgccccgcaacctccccttctacgagcggctcggcttcaccgtcaccgccgacgtcgaggtgcccgaaggaccgcgcacctggtgcatgacccgcaagcccggtgcctga

SEQ ID NO: 1692 - DNA, 2208 bp, Artificial Sequence
  Synthetic Polynucleotides
atggccttaccagtgaccgccttgctcctgccgctggccttgctgctccacgccgccaggccggacgacgtcgtgatgacccagagccctctgagcctgcctgtgtccctgggcgatcaggccagcatctcctgcagatccagccagagactggtgcacagcaacggcaacacctacctgcactggtatctgcagaagcccggccagagccccaagctgctgatctaccgggtgtccaacagattccccggcgtgcccgatagattcagcggctctggcagcggcaccgacttcaccctgaagatcagccgggtggaagccgaggacctgggcatctatttctgcagccagagcacccacgtgccctacacctttggcggaggcaccaagctggaaatcaagcggggcggaggcggaagtggaggcggaggatctggcggcggaggctctgaagtgcggctgcagcagtctggccccgacctgattaagcctggggccagcgtgaagatgagctgcaaggccagcggctacaccttcaccggctacgtgatgcactgggtcaagcagaggccaggccagggcctggaatggatcggcttcatcaacccctacaacgacgacatccagagcaacgagcggttccggggcaaggccaccctgaccagcgataagagcagcaccaccgcctacatggaactgagcagcctgacctccgaggacagcgccgtgtactactgtgctaggggagccggctacaacttcgacggggcctacagattcttcgacttttggggccagggcaccacactgaccgtgtcctctacgcgtgagcagaaactgatctcggaagaggatctggcgaagcccaccacgacgccagcgccgcgaccaccaacaccggcgcccaccatcgcgtcgcagcccctgtccctgcgcccagaggcgtgccggccagcggcggggggcgcagtgcacacgagggggctggacttcgcctgtgacatctacatctgggcgcccttggccgggacttgtggggtccttctcctgtcactggttatcaccctttactgcaaacggggcagaaagaaactcctgtatatattcaaacaaccatttatgagaccagtacaaactactcaagaggaagatggctgtagctgccgatttccagaagaagaagaaggaggatgtgaactgagagtgaagttcagcaggagcgcagacgcccccgcgtaccagcagggccagaaccagctctataacgagctgaatctaggacgaagagaggagtacgatgttttggacaagagacgtggccgggaccctgagatggggggaaagccgagaaggaagaaccctcaggaaggcctgtacaatgaactgcagaaagataagatggcggaggcctacagtgagattgggatgaaaggcgagcgccggaggggcaaggggcacgatggcctttaccagggtctcagtacagccaccaaggacacctacgacgcccttcacatgcaggccctgccccctcgctctagtggctccggcgagggcagaggaagtctactaacctgcggagatgtggaagaaaatcctggcccacatatgaccgagtacaagcccacggtgcgcctcgccacccgcgacgacgtccccagggccgtacgcaccctcgccgccgcgttcgccgactaccccgccacgcgccacaccgtcgatccggaccgccacatcgagcgggtcaccgagctgcaagaactcttcctcacgcgcgtcgggctcgacatcggcaaggtgtgggtcgcggacgacggcgccgcggtggcggtctggaccacgccggagagcgtcgaagcgggggcggtgttcgccgagatcggcccgcgcatggccgagttgagcggttcccggctggccgcgcagcaacagatggaaggcctcctggcgccgcaccggcccaaggagcccgcgtggttcctggccaccgtcggcgtctcgcccgaccaccagggcaagggtctgggcagcgccgtcgtgctccccggagtggaggcggccgagcgcgccggggtgcccgccttcctggagacctccgcgccccgcaacctccccttctacgagcggctcggcttcaccgtcaccgccgacgtcgaggtgcccgaaggaccgcgcacctggtgcatgacccgcaagcccggtgcctga

SEQ ID NO: 1693 - DNA, 2181 bp, Artificial Sequence
  Synthetic Polynucleotides
atggccttaccagtgaccgccttgctcctgccgctggccttgctgctccacgccgccaggccggacagctacgagctgacccagcctcctagcgtgtccgtgtctcctggacagaccgccaccatctcttgcagcggcgatcaactgggcgggaagtacggccactggtatcagaagaagcccggccagagccccgtgctggtgctgtaccaggacagaaaacggcctgccggcatccccgagagattcagcggaagcagcagcggcaacaccatcaccctgaccatcagcggcacccaggccgtggatgaggccgactactactgccaggcttgggacaccaatctgggcggcgtgttcggcggaggcaccaaagtgacagtgctgggacagggcggaggcggaagtggaggcggaggatctggcggcggaggctctcaggtgcaactggtggaaagcggagccgaagtgaagaaacctggggccagcgtgaaggtgtcctgcaaggccagcggctacacctttaccggctactacatgcactgggtgcgccaggctccaggccagggactggaatggatgggccggatcaaccccaatagcggcggcaccaactacgcccagaaattccagggcagagtgaccatgaccagagacaccagcatcagcaccgcctacatggaactgagccggctgagaagcgacgacaccgccgtgtactactgcgccagccctagaggcagaggcagcgccttcgatatttggggccagggcacactcgtgaccgtgtcctctacgcgtgagcagaaactgatctcggaagaggatctggcgaagcccaccacgacgccagcgccgcgaccaccaacaccggcgcccaccatcgcgtcgcagcccctgtccctgcgcccagaggcgtgccggccagcggcggggggcgcagtgcacacgagggggctggacttcgcctgtgacatctacatctgggcgcccttggccgggacttgtggggtccttctcctgtcactggttatcaccctttactgcaaacggggcagaaagaaactcctgtatatattcaaacaaccatttatgagaccagtacaaactactcaagaggaagatggctgtagctgccgatttccagaagaagaagaaggaggatgtgaactgagagtgaagttcagcaggagcgcagacgcccccgcgtaccagcagggccagaaccagctctataacgagctgaatctaggacgaagagaggagtacgatgttttggacaagagacgtggccgggaccctgagatggggggaaagccgagaaggaagaaccctcaggaaggcctgtacaatgaactgcagaaagataagatggcggaggcctacagtgagattgggatgaaaggcgagcgccggaggggcaaggggcacgatggcctttaccagggtctcagtacagccaccaaggacacctacgacgcccttcacatgcaggccctgccccctcgctctagtggctccggcgagggcagaggaagtctactaacctgcggagatgtggaagaaaatcctggcccacatatgaccgagtacaagcccacggtgcgcctcgccacccgcgacgacgtccccagggccgtacgcaccctcgccgccgcgttcgccgactaccccgccacgcgccacaccgtcgatccggaccgccacatcgagcgggtcaccgagctgcaagaactcttcctcacgcgcgtcgggctcgacatcggcaaggtgtgggtcgcggacgacggcgccgcggtggcggtctggaccacgccggagagcgtcgaagcgggggcggtgttcgccgagatcggcccgcgcatggccgagttgagcggttcccggctggccgcgcagcaacagatggaaggcctcctggcgccgcaccggcccaaggagcccgcgtggttcctggccaccgtcggcgtctcgcccgaccaccagggcaagggtctgggcagcgccgtcgtgctccccggagtggaggcggccgagcgcgccggggtgcccgccttcctggagacctccgcgccccgcaacctccccttctacgagcggctcggcttcaccgtcaccgccgacgtcgaggtgcccgaaggaccgcgcacctggtgcatgacccgcaagcccggtgcctga

SEQ ID NO: 1694 - DNA, 2190 bp, Artificial Sequence
  Synthetic Polynucleotides
atggccttaccagtgaccgccttgctcctgccgctggccttgctgctccacgccgccaggccggacaacttcatgctgacccagccccacagcgtgtccgagagccctggcaagaccgtgaccatctcctgcaccagaagcagcggctctatcgccagcaaatacgtgcagtggtatcagcagaggcccggcagcagccctaccaccgtgatctacgaggacaaccagaggcctagcggcgtgcccgatagattcagcggcagcatcgacaccagcagcaacagcgccagcctgaccatcagcggcctgagaacagaggacgaggccgactactactgccacagctacgacagcaacaaccactccgtgttcggcggaggcaccaaagtgacagtgctgggacagggcggaggcggaagtggaggcggaggatctggcggcggaggctctgaagtgcaactggtggaaagcgggggaggcgtggtgcagccaggcggatctctgagactgagctgtgccgccagcggcttcaccttcagcagctacgccatgagctgggtgcgccaggcccctggaaaaggcctggaatgggtgtccgccatctctggctctggcggcagcacctactacgccgatagcgtgaagggccggttcagcatcagccgggacaacagcaagaacaccctgtacctccagatgaacagcctgcgggccgaggacaccgccgtgtactactgtgccagaaccagaagctccggggccttcgacatctggggccagggaacactcgtgaccgtgtcctctacgcgtgagcagaaactgatctcggaagaggatctggcgaagcccaccacgacgccagcgccgcgaccaccaacaccggcgcccaccatcgcgtcgcagcccctgtccctgcgcccagaggcgtgccggccagcggcggggggcgcagtgcacacgagggggctggacttcgcctgtgacatctacatctgggcgcccttggccgggacttgtggggtccttctcctgtcactggttatcaccctttactgcaaacggggcagaaagaaactcctgtatatattcaaacaaccatttatgagaccagtacaaactactcaagaggaagatggctgtagctgccgatttccagaagaagaagaaggaggatgtgaactgagagtgaagttcagcaggagcgcagacgcccccgcgtaccagcagggccagaaccagctctataacgagctgaatctaggacgaagagaggagtacgatgttttggacaagagacgtggccgggaccctgagatggggggaaagccgagaaggaagaaccctcaggaaggcctgtacaatgaactgcagaaagataagatggcggaggcctacagtgagattgggatgaaaggcgagcgccggaggggcaaggggcacgatggcctttaccagggtctcagtacagccaccaaggacacctacgacgcccttcacatgcaggccctgccccctcgctctagtggctccggcgagggcagaggaagtctactaacctgcggagatgtggaagaaaatcctggcccacatatgaccgagtacaagcccacggtgcgcctcgccacccgcgacgacgtccccagggccgtacgcaccctcgccgccgcgttcgccgactaccccgccacgcgccacaccgtcgatccggaccgccacatcgagcgggtcaccgagctgcaagaactcttcctcacgcgcgtcgggctcgacatcggcaaggtgtgggtcgcggacgacggcgccgcggtggcggtctggaccacgccggagagcgtcgaagcgggggcggtgttcgccgagatcggcccgcgcatggccgagttgagcggttcccggctggccgcgcagcaacagatggaaggcctcctggcgccgcaccggcccaaggagcccgcgtggttcctggccaccgtcggcgtctcgcccgaccaccagggcaagggtctgggcagcgccgtcgtgctccccggagtggaggcggccgagcgcgccggggtgcccgccttcctggagacctccgcgccccgcaacctccccttctacgagcggctcggcttcaccgtcaccgccgacgtcgaggtgcccgaaggaccgcgcacctggtgcatgacccgcaagcccggtgcctga

SEQ ID NO: 1695 - DNA, 2175 bp, Artificial Sequence
  Synthetic Polynucleotides
atggccttaccagtgaccgccttgctcctgccgctggccttgctgctccacgccgccaggccggacatccagatgaaccagagccccagcagcctgagcgccagcctgggcgataccatcaccatcacctgtcacgccagccagaacatcaacgtgtggctgagctggtatcagcagaagcccggcaacatccccaagctgctgatctacaaggccagcaacctgcacaccggcgtgcccagcagattttctggcagcggctctggcaccggcttcaccattaccatcagctccctccagcccgaggacattgccacctactactgccagcagggccagagctacccctggacatttggcggaggcaccaagctggaaatcaagagaggcggaggcggaagtggaggcggaggatctggcggcggaggctctgaagtgcaactccagcagagcggcccagagcttgtgaagcctggcgcttccgtgaagattagctgcaaagccagcggctacagcttcaccggctacttcatgaactgggtcaagcagagccacggcaagagcctggagtacatcggcagattcaacccctacaacggcgagacactgtacaaccagaagttcaagggcaaggccaccctgaccgtggacaagagcagcagcaccgtgcacatggaactgctgagcgtgaccagcgaggacagcgccgtgtactactgtggcagaagcggcaacgacgacgctatggactattggggccagggcaccagcgtgaccgtgtctagtgctacgcgtgagcagaaactgatctcggaagaggatctggcgaagcccaccacgacgccagcgccgcgaccaccaacaccggcgcccaccatcgcgtcgcagcccctgtccctgcgcccagaggcgtgccggccagcggcggggggcgcagtgcacacgagggggctggacttcgcctgtgacatctacatctgggcgcccttggccgggacttgtggggtccttctcctgtcactggttatcaccctttactgcaaacggggcagaaagaaactcctgtatatattcaaacaaccatttatgagaccagtacaaactactcaagaggaagatggctgtagctgccgatttccagaagaagaagaaggaggatgtgaactgagagtgaagttcagcaggagcgcagacgcccccgcgtaccagcagggccagaaccagctctataacgagctgaatctaggacgaagagaggagtacgatgttttggacaagagacgtggccgggaccctgagatggggggaaagccgagaaggaagaaccctcaggaaggcctgtacaatgaactgcagaaagataagatggcggaggcctacagtgagattgggatgaaaggcgagcgccggaggggcaaggggcacgatggcctttaccagggtctcagtacagccaccaaggacacctacgacgcccttcacatgcaggccctgccccctcgctctagtggctccggcgagggcagaggaagtctactaacctgcggagatgtggaagaaaatcctggcccacatatgaccgagtacaagcccacggtgcgcctcgccacccgcgacgacgtccccagggccgtacgcaccctcgccgccgcgttcgccgactaccccgccacgcgccacaccgtcgatccggaccgccacatcgagcgggtcaccgagctgcaagaactcttcctcacgcgcgtcgggctcgacatcggcaaggtgtgggtcgcggacgacggcgccgcggtggcggtctggaccacgccggagagcgtcgaagcgggggcggtgttcgccgagatcggcccgcgcatggccgagttgagcggttcccggctggccgcgcagcaacagatggaaggcctcctggcgccgcaccggcccaaggagcccgcgtggttcctggccaccgtcggcgtctcgcccgaccaccagggcaagggtctgggcagcgccgtcgtgctccccggagtggaggcggccgagcgcgccggggtgcccgccttcctggagacctccgcgccccgcaacctccccttctacgagcggctcggcttcaccgtcaccgccgacgtcgaggtgcccgaaggaccgcgcacctggtgcatgacccgcaagcccggtgcctga

SEQ ID NO: 1696 - DNA, 2178 bp, Artificial Sequence
  Synthetic Polynucleotides
atggccttaccagtgaccgccttgctcctgccgctggccttgctgctccacgccgccaggccggacgacatccagatgacccagagccccagcatcctgagcgccagcgtgggcgacagagtgaccatcacctgtcgggccagccagagattcggcgactacctggcctggtatcagcagaagcctggacaggcccccaagctgctgatctacggcgcttccacactccagagcggcgtgcccagcagattttctggcagcggctccggcaccgagttcaccctgacaatcagcggcctccagcccgaggacttcgccacctactattgccagcaggccaacagcttccctatcaccttcggcaagggcacccggctggacatcagaagaggcggaggcggaagtggaggcggaggatctggcggcggaggctctcaggtgcagctggtgcagtctggggccgaagtgaagaaacccggcagcagcgtgaaggtgtcctgcaaggcttccggcggcaccttcagcagctacgccatttcttgggtgcgccaggccccaggacagggcctggaatggatgggctggatcaacgtgggcaacggcaacgccatctacagccagaaattccagggccgcgtgacaatcaccagagacaccagcgccaccaccgcctacatggaactgagcagcctgcggagcgaggacaccgccgtgtactactgtgccagggatggcgagagagcctgggacctggattattggggccagggcacactcgtgaccgtgtcctctacgcgtgagcagaaactgatctcggaagaggatctggcgaagcccaccacgacgccagcgccgcgaccaccaacaccggcgcccaccatcgcgtcgcagcccctgtccctgcgcccagaggcgtgccggccagcggcggggggcgcagtgcacacgagggggctggacttcgcctgtgacatctacatctgggcgcccttggccgggacttgtggggtccttctcctgtcactggttatcaccctttactgcaaacggggcagaaagaaactcctgtatatattcaaacaaccatttatgagaccagtacaaactactcaagaggaagatggctgtagctgccgatttccagaagaagaagaaggaggatgtgaactgagagtgaagttcagcaggagcgcagacgcccccgcgtaccagcagggccagaaccagctctataacgagctgaatctaggacgaagagaggagtacgatgttttggacaagagacgtggccgggaccctgagatggggggaaagccgagaaggaagaaccctcaggaaggcctgtacaatgaactgcagaaagataagatggcggaggcctacagtgagattgggatgaaaggcgagcgccggaggggcaaggggcacgatggcctttaccagggtctcagtacagccaccaaggacacctacgacgcccttcacatgcaggccctgccccctcgctctagtggctccggcgagggcagaggaagtctactaacctgcggagatgtggaagaaaatcctggcccacatatgaccgagtacaagcccacggtgcgcctcgccacccgcgacgacgtccccagggccgtacgcaccctcgccgccgcgttcgccgactaccccgccacgcgccacaccgtcgatccggaccgccacatcgagcgggtcaccgagctgcaagaactcttcctcacgcgcgtcgggctcgacatcggcaaggtgtgggtcgcggacgacggcgccgcggtggcggtctggaccacgccggagagcgtcgaagcgggggcggtgttcgccgagatcggcccgcgcatggccgagttgagcggttcccggctggccgcgcagcaacagatggaaggcctcctggcgccgcaccggcccaaggagcccgcgtggttcctggccaccgtcggcgtctcgcccgaccaccagggcaagggtctgggcagcgccgtcgtgctccccggagtggaggcggccgagcgcgccggggtgcccgccttcctggagacctccgcgccccgcaacctccccttctacgagcggctcggcttcaccgtcaccgccgacgtcgaggtgcccgaaggaccgcgcacctggtgcatgacccgcaagcccggtgcctga

SEQ ID NO: 1697 - DNA, 2193 bp, Artificial Sequence
  Synthetic Polynucleotides
atggccttaccagtgaccgccttgctcctgccgctggccttgctgctccacgccgccaggccggacgagacaaccctgacacagagccctggcaccctgagcctgtctccaggcgaaagagccacactgagctgtcgggccagccagagcgtgtccagctcttacctggcctggtatcagcagaagcccggccaggctccccggctgctgatctatggcgcttctagcagagccaccggcatccccgatagattcagcggctctggcagcggcaccgacttcaccctgaccatcagcagactggaacccgaggacttcgccgtgtactactgccagcagtacggcagcagcccctacacattcggccagggcaccaagctggaaatcaagagaggcggaggcggaagtggaggcggaggatctggcggcggaggctctcaggtgcaactggtgcagtctggcggcggagtggtgcagcctggaagaagcctgagactgtcctgtgccgccagcggcttcaccttcagcagctacgccatgcactgggtgcgccaggcccctggaaaaggactggaatgggtggccgtgatctcctacgacggcagcaacaagtattacgccgacagcgtgaagggccggttcaccatctccagagacaacagcaagaacaccctgtacctccagatgaacagcctgcgggccgaggacacagccgtgtattattgcgccagagagctgcggttcctggaatggtccagcgacgccttcgacatctggggccagggaacaatggtcaccgtgtcctccacgcgtgagcagaaactgatctcggaagaggatctggcgaagcccaccacgacgccagcgccgcgaccaccaacaccggcgcccaccatcgcgtcgcagcccctgtccctgcgcccagaggcgtgccggccagcggcggggggcgcagtgcacacgagggggctggacttcgcctgtgacatctacatctgggcgcccttggccgggacttgtggggtccttctcctgtcactggttatcaccctttactgcaaacggggcagaaagaaactcctgtatatattcaaacaaccatttatgagaccagtacaaactactcaagaggaagatggctgtagctgccgatttccagaagaagaagaaggaggatgtgaactgagagtgaagttcagcaggagcgcagacgcccccgcgtaccagcagggccagaaccagctctataacgagctgaatctaggacgaagagaggagtacgatgttttggacaagagacgtggccgggaccctgagatggggggaaagccgagaaggaagaaccctcaggaaggcctgtacaatgaactgcagaaagataagatggcggaggcctacagtgagattgggatgaaaggcgagcgccggaggggcaaggggcacgatggcctttaccagggtctcagtacagccaccaaggacacctacgacgcccttcacatgcaggccctgccccctcgctctagtggctccggcgagggcagaggaagtctactaacctgcggagatgtggaagaaaatcctggcccacatatgaccgagtacaagcccacggtgcgcctcgccacccgcgacgacgtccccagggccgtacgcaccctcgccgccgcgttcgccgactaccccgccacgcgccacaccgtcgatccggaccgccacatcgagcgggtcaccgagctgcaagaactcttcctcacgcgcgtcgggctcgacatcggcaaggtgtgggtcgcggacgacggcgccgcggtggcggtctggaccacgccggagagcgtcgaagcgggggcggtgttcgccgagatcggcccgcgcatggccgagttgagcggttcccggctggccgcgcagcaacagatggaaggcctcctggcgccgcaccggcccaaggagcccgcgtggttcctggccaccgtcggcgtctcgcccgaccaccagggcaagggtctgggcagcgccgtcgtgctccccggagtggaggcggccgagcgcgccggggtgcccgccttcctggagacctccgcgccccgcaacctccccttctacgagcggctcggcttcaccgtcaccgccgacgtcgaggtgcccgaaggaccgcgcacctggtgcatgacccgcaagcccggtgcctga

SEQ ID NO: 1698 - DNA, 2178 bp, Artificial Sequence
  Synthetic Polynucleotides
atggccttaccagtgaccgccttgctcctgccgctggccttgctgctccacgccgccaggccggagatcgtgctgacacagagccctgccaccctgtctctgagccctggcgaaagagccaccctgagctgtagagccagccagagcgtgcggagctacctggcctggtatcagcagaagcctggacaggcccccagactgctgatctacgacgccagcaatcgggccacaggcatccccgccagattttctggctctggcagcggcaccgacttcaccctgacaatcagcagcctggaacccgaggacttcgccgtgtactactgccagcagcggagcaactggccccctacctttggacagggcaccaaggtggaaatcaagggcggaggcggaagtggaggcggaggatctggcggcggaggctctcaactccaggtgcaggaatctggccccggactcgtgaagcccagcgagacactgagcctgacctgtaccgtgtccggcggcagcatcagcaacagctacttctcctggggctggatcagacagccccctggcaagggcctggaatggatcggcagcttctactacggcgagaaaacctactacaaccccagcctgaagtccagagccaccatcagcatcgacaccagcaagagccagttctccctgaagctgagcagcgtgacagccgccgacaccgccgtgtattattgccccagaggccccaccatgatccggggcgtgatcgactcttggggccagggaacactcgtgaccgtgtcctctacgcgtgagcagaaactgatctcggaagaggatctggcgaagcccaccacgacgccagcgccgcgaccaccaacaccggcgcccaccatcgcgtcgcagcccctgtccctgcgcccagaggcgtgccggccagcggcggggggcgcagtgcacacgagggggctggacttcgcctgtgacatctacatctgggcgcccttggccgggacttgtggggtccttctcctgtcactggttatcaccctttactgcaaacggggcagaaagaaactcctgtatatattcaaacaaccatttatgagaccagtacaaactactcaagaggaagatggctgtagctgccgatttccagaagaagaagaaggaggatgtgaactgagagtgaagttcagcaggagcgcagacgcccccgcgtaccagcagggccagaaccagctctataacgagctgaatctaggacgaagagaggagtacgatgttttggacaagagacgtggccgggaccctgagatggggggaaagccgagaaggaagaaccctcaggaaggcctgtacaatgaactgcagaaagataagatggcggaggcctacagtgagattgggatgaaaggcgagcgccggaggggcaaggggcacgatggcctttaccagggtctcagtacagccaccaaggacacctacgacgcccttcacatgcaggccctgccccctcgctctagtggctccggcgagggcagaggaagtctactaacctgcggagatgtggaagaaaatcctggcccacatatgaccgagtacaagcccacggtgcgcctcgccacccgcgacgacgtccccagggccgtacgcaccctcgccgccgcgttcgccgactaccccgccacgcgccacaccgtcgatccggaccgccacatcgagcgggtcaccgagctgcaagaactcttcctcacgcgcgtcgggctcgacatcggcaaggtgtgggtcgcggacgacggcgccgcggtggcggtctggaccacgccggagagcgtcgaagcgggggcggtgttcgccgagatcggcccgcgcatggccgagttgagcggttcccggctggccgcgcagcaacagatggaaggcctcctggcgccgcaccggcccaaggagcccgcgtggttcctggccaccgtcggcgtctcgcccgaccaccagggcaagggtctgggcagcgccgtcgtgctccccggagtggaggcggccgagcgcgccggggtgcccgccttcctggagacctccgcgccccgcaacctccccttctacgagcggctcggcttcaccgtcaccgccgacgtcgaggtgcccgaaggaccgcgcacctggtgcatgacccgcaagcccggtgcctga

SEQ ID NO: 1699 - DNA, 2169 bp, Artificial Sequence
  Synthetic Polynucleotides
atggccttaccagtgaccgccttgctcctgccgctggccttgctgctccacgccgccaggccggacatccagatgacacagagccctagcagcctgtctgccagcgtgggagacagagtgaccatcacctgtagagccagccagggcatctcttcttggctggcctggtatcagcagaagcccgagaaggcccctaagagcctgatctatgccgccagctctctccagagcggagtgcctagcagattttctggcagcggctccggcaccgatttcaccctgacaatatccagcctccagcctgaggacttcgccacctactactgccagcagtacaacagctacccctacaccttcggccagggcaccaagctggaaatcaaaggcggaggcggaagtggaggcggaggatctggcggcggaggctctcaagtgcaactggttcagagcggtgccgaagtgcggaagcctggcagctctgtgaaggtgtcctgtaaagcctccggcggcagcttcaacaactaccccatcttctgggtccgacaggcccctggacagggctttgaatggatgggcagaatcatccccatcctgggcatcaccgcctacgctcagaaattccagggccgcgtgacaatcaccgccgacaagtctacaagcacagcctacatggaactgaacagcctgcggagcgaggacaccgccgtgtattattgtgccggcggagatgacctggacgcctttgacatttggggccagggaacaatggtgtccgtgtcctctacgcgtgagcagaaactgatctcggaagaggatctggcgaagcccaccacgacgccagcgccgcgaccaccaacaccggcgcccaccatcgcgtcgcagcccctgtccctgcgcccagaggcgtgccggccagcggcggggggcgcagtgcacacgagggggctggacttcgcctgtgacatctacatctgggcgcccttggccgggacttgtggggtccttctcctgtcactggttatcaccctttactgcaaacggggcagaaagaaactcctgtatatattcaaacaaccatttatgagaccagtacaaactactcaagaggaagatggctgtagctgccgatttccagaagaagaagaaggaggatgtgaactgagagtgaagttcagcaggagcgcagacgcccccgcgtaccagcagggccagaaccagctctataacgagctgaatctaggacgaagagaggagtacgatgttttggacaagagacgtggccgggaccctgagatggggggaaagccgagaaggaagaaccctcaggaaggcctgtacaatgaactgcagaaagataagatggcggaggcctacagtgagattgggatgaaaggcgagcgccggaggggcaaggggcacgatggcctttaccagggtctcagtacagccaccaaggacacctacgacgcccttcacatgcaggccctgccccctcgctctagtggctccggcgagggcagaggaagtctactaacctgcggagatgtggaagaaaatcctggcccacatatgaccgagtacaagcccacggtgcgcctcgccacccgcgacgacgtccccagggccgtacgcaccctcgccgccgcgttcgccgactaccccgccacgcgccacaccgtcgatccggaccgccacatcgagcgggtcaccgagctgcaagaactcttcctcacgcgcgtcgggctcgacatcggcaaggtgtgggtcgcggacgacggcgccgcggtggcggtctggaccacgccggagagcgtcgaagcgggggcggtgttcgccgagatcggcccgcgcatggccgagttgagcggttcccggctggccgcgcagcaacagatggaaggcctcctggcgccgcaccggcccaaggagcccgcgtggttcctggccaccgtcggcgtctcgcccgaccaccagggcaagggtctgggcagcgccgtcgtgctccccggagtggaggcggccgagcgcgccggggtgcccgccttcctggagacctccgcgccccgcaacctccccttctacgagcggctcggcttcaccgtcaccgccgacgtcgaggtgcccgaaggaccgcgcacctggtgcatgacccgcaagcccggtgcctga

SEQ ID NO: 1700 - DNA, 2205 bp, Artificial Sequence
  Synthetic Polynucleotides
atggccttaccagtgaccgccttgctcctgccgctggccttgctgctccacgccgccaggccggacatcgtgatgacccagacccccctgagcctgcctgtgacacctggcgagcctgccagcatctcctgcagaagcagcagaagcctgctggacagcgacgacggcaacacctacctggactggtatctgcagaaacccggccagagcccccaactgctgatctacaccctgagctacagagccagcggcgtgcccgatagattttccggctctggcagcggcaccgacttcaccctgaagatcagccgggtggaagccgaggacgtgggcgtgtactactgtatgcagcgggtggaatttcccatcaccttcggccagggcaccagactggaaatcaagagaggcggaggcggaagtggaggcggaggatctggcggcggaggctctcaggtgcaactggtggaatctggcgggggagtggtgcagcctggcagatccctgagactgagctgtgccgccagcggcttcatcttcagcagatacggaatgcactgggtgcgccaggcccctggcaagggactgaaatgggtggccgtgatttggtacgacggcagcaacaagctgtacgccgacagcgtgaagggccggttcaccatcagcagagacaacagcaagaacaccctgtacctgcagatgaacagcctgcgggccgaggacaccgccgtgtactattgcgccagagactactacgacaacagccggcaccactggggcttcgactattggggccagggaacccttgtgaccgtgtcctctacgcgtgagcagaaactgatctcggaagaggatctggcgaagcccaccacgacgccagcgccgcgaccaccaacaccggcgcccaccatcgcgtcgcagcccctgtccctgcgcccagaggcgtgccggccagcggcggggggcgcagtgcacacgagggggctggacttcgcctgtgacatctacatctgggcgcccttggccgggacttgtggggtccttctcctgtcactggttatcaccctttactgcaaacggggcagaaagaaactcctgtatatattcaaacaaccatttatgagaccagtacaaactactcaagaggaagatggctgtagctgccgatttccagaagaagaagaaggaggatgtgaactgagagtgaagttcagcaggagcgcagacgcccccgcgtaccagcagggccagaaccagctctataacgagctgaatctaggacgaagagaggagtacgatgttttggacaagagacgtggccgggaccctgagatggggggaaagccgagaaggaagaaccctcaggaaggcctgtacaatgaactgcagaaagataagatggcggaggcctacagtgagattgggatgaaaggcgagcgccggaggggcaaggggcacgatggcctttaccagggtctcagtacagccaccaaggacacctacgacgcccttcacatgcaggccctgccccctcgctctagtggctccggcgagggcagaggaagtctactaacctgcggagatgtggaagaaaatcctggcccacatatgaccgagtacaagcccacggtgcgcctcgccacccgcgacgacgtccccagggccgtacgcaccctcgccgccgcgttcgccgactaccccgccacgcgccacaccgtcgatccggaccgccacatcgagcgggtcaccgagctgcaagaactcttcctcacgcgcgtcgggctcgacatcggcaaggtgtgggtcgcggacgacggcgccgcggtggcggtctggaccacgccggagagcgtcgaagcgggggcggtgttcgccgagatcggcccgcgcatggccgagttgagcggttcccggctggccgcgcagcaacagatggaaggcctcctggcgccgcaccggcccaaggagcccgcgtggttcctggccaccgtcggcgtctcgcccgaccaccagggcaagggtctgggcagcgccgtcgtgctccccggagtggaggcggccgagcgcgccggggtgcccgccttcctggagacctccgcgccccgcaacctccccttctacgagcggctcggcttcaccgtcaccgccgacgtcgaggtgcccgaaggaccgcgcacctggtgcatgacccgcaagcccggtgcctga

SEQ ID NO: 1701 - DNA, 2175 bp, Artificial Sequence
  Synthetic Polynucleotides
atggccttaccagtgaccgccttgctcctgccgctggccttgctgctccacgccgccaggccggagatccagatgacccagagccccagcagcatgtctgccagcctgggcgacaccatcaccatcacatgccaggccacccaggacatcttcaagaacctgaactggtatcagcagaagcccggcaagccccccagcctgctgatctactatgccaccgaactggccgagggcgtgcccagcagattttctggcagcggcagcggctccgactacagcctgaccatcagcaacctggaaagcgaggacttcgccgcctactactgcctccagttcttcgagttcccattcaccttcggctccggcaccaagctggaaatgaagggcggaggcggaagtggaggcggaggatctggcggcggaggctctcaggtgcaactccagcagtctggcgctgagcttgtgcggcctggcacctctgtgaaggtgtcctgtaaagccagcggctacgtgttcaccaactactggatcgagtggatcaagcagcggccaggccagggcctggaatggatcggcgtgatgaatccaggcagcggcgagacaacctacaacgagaagttcaagggcaaggccaccctgaccgccgacaagagcagcagcacagcctacatgcaactgtcctccctgaccagcgtggacagcgccgtgtacttctgcgccagggaccacgaccgggactactacgctatggactactggggccagggcaccagcgtgaccgtgtcatctacgcgtgagcagaaactgatctcggaagaggatctggcgaagcccaccacgacgccagcgccgcgaccaccaacaccggcgcccaccatcgcgtcgcagcccctgtccctgcgcccagaggcgtgccggccagcggcggggggcgcagtgcacacgagggggctggacttcgcctgtgacatctacatctgggcgcccttggccgggacttgtggggtccttctcctgtcactggttatcaccctttactgcaaacggggcagaaagaaactcctgtatatattcaaacaaccatttatgagaccagtacaaactactcaagaggaagatggctgtagctgccgatttccagaagaagaagaaggaggatgtgaactgagagtgaagttcagcaggagcgcagacgcccccgcgtaccagcagggccagaaccagctctataacgagctgaatctaggacgaagagaggagtacgatgttttggacaagagacgtggccgggaccctgagatggggggaaagccgagaaggaagaaccctcaggaaggcctgtacaatgaactgcagaaagataagatggcggaggcctacagtgagattgggatgaaaggcgagcgccggaggggcaaggggcacgatggcctttaccagggtctcagtacagccaccaaggacacctacgacgcccttcacatgcaggccctgccccctcgctctagtggctccggcgagggcagaggaagtctactaacctgcggagatgtggaagaaaatcctggcccacatatgaccgagtacaagcccacggtgcgcctcgccacccgcgacgacgtccccagggccgtacgcaccctcgccgccgcgttcgccgactaccccgccacgcgccacaccgtcgatccggaccgccacatcgagcgggtcaccgagctgcaagaactcttcctcacgcgcgtcgggctcgacatcggcaaggtgtgggtcgcggacgacggcgccgcggtggcggtctggaccacgccggagagcgtcgaagcgggggcggtgttcgccgagatcggcccgcgcatggccgagttgagcggttcccggctggccgcgcagcaacagatggaaggcctcctggcgccgcaccggcccaaggagcccgcgtggttcctggccaccgtcggcgtctcgcccgaccaccagggcaagggtctgggcagcgccgtcgtgctccccggagtggaggcggccgagcgcgccggggtgcccgccttcctggagacctccgcgccccgcaacctccccttctacgagcggctcggcttcaccgtcaccgccgacgtcgaggtgcccgaaggaccgcgcacctggtgcatgacccgcaagcccggtgcctga

SEQ ID NO: 1702 - DNA, 2166 bp, Artificial Sequence
  Synthetic Polynucleotides
atggccttaccagtgaccgccttgctcctgccgctggccttgctgctccacgccgccaggccggacatcctgctgacacagagccccgccatcctgtccgtgtctccaggcgagagagtgtcctttagctgccgggccagccagaacatcggcaccagcatccactggtatcagcagcggaccaacggcagccccagactgctgattaagtacgccagcgagtccgtgtccggcatccccagcagattttctggcagcggctccggcaccgacttcaccctgagcatcaacagcgtggaaagcgaggacattgccgactactactgccagcacaccaatagctggcccaccacctttggcggaggcaccaagctggaaatcaagagaggcggaggcggaagtggaggcggaggatctggcggcggaggctctcaggtgcaactccagcagtccgacgccgagcttgtgaagcctggcgcttccgtgaagattagctgcaaggccagcggctacaccttcaccgaccacgccattcactgggtcaagcagaagcccgagcagggcctggaatggatcggctacttcagccccggcaacggcgacatcaagtacaacgagaagttcaagggcaaggccaccctgaccgccgacaagagcagcagcacagcctacatgcaactgaacagcctgaccagcgaggactccgccgtgtacttctgcaagcggagctacggcaactacgactactggggccagggcaccacactgaccgtgtctagtacgcgtgagcagaaactgatctcggaagaggatctggcgaagcccaccacgacgccagcgccgcgaccaccaacaccggcgcccaccatcgcgtcgcagcccctgtccctgcgcccagaggcgtgccggccagcggcggggggcgcagtgcacacgagggggctggacttcgcctgtgacatctacatctgggcgcccttggccgggacttgtggggtccttctcctgtcactggttatcaccctttactgcaaacggggcagaaagaaactcctgtatatattcaaacaaccatttatgagaccagtacaaactactcaagaggaagatggctgtagctgccgatttccagaagaagaagaaggaggatgtgaactgagagtgaagttcagcaggagcgcagacgcccccgcgtaccagcagggccagaaccagctctataacgagctgaatctaggacgaagagaggagtacgatgttttggacaagagacgtggccgggaccctgagatggggggaaagccgagaaggaagaaccctcaggaaggcctgtacaatgaactgcagaaagataagatggcggaggcctacagtgagattgggatgaaaggcgagcgccggaggggcaaggggcacgatggcctttaccagggtctcagtacagccaccaaggacacctacgacgcccttcacatgcaggccctgccccctcgctctagtggctccggcgagggcagaggaagtctactaacctgcggagatgtggaagaaaatcctggcccacatatgaccgagtacaagcccacggtgcgcctcgccacccgcgacgacgtccccagggccgtacgcaccctcgccgccgcgttcgccgactaccccgccacgcgccacaccgtcgatccggaccgccacatcgagcgggtcaccgagctgcaagaactcttcctcacgcgcgtcgggctcgacatcggcaaggtgtgggtcgcggacgacggcgccgcggtggcggtctggaccacgccggagagcgtcgaagcgggggcggtgttcgccgagatcggcccgcgcatggccgagttgagcggttcccggctggccgcgcagcaacagatggaaggcctcctggcgccgcaccggcccaaggagcccgcgtggttcctggccaccgtcggcgtctcgcccgaccaccagggcaagggtctgggcagcgccgtcgtgctccccggagtggaggcggccgagcgcgccggggtgcccgccttcctggagacctccgcgccccgcaacctccccttctacgagcggctcggcttcaccgtcaccgccgacgtcgaggtgcccgaaggaccgcgcacctggtgcatgacccgcaagcccggtgcctga

SEQ ID NO: 1703 - DNA, 2181 bp, Artificial Sequence
  Synthetic Polynucleotides
atggccttaccagtgaccgccttgctcctgccgctggccttgctgctccacgccgccaggccggacatcgtgatgacccagagccccgatagcctggccgtgtctctgggagagagagccaccatcaactgcaagagcagccagagcctgctgaacagcggcgaccagaagaactacctgacctggtatcagcagaagcccggccagccccccaagctgctgatctactgggccagcaccagagaaagcggcgtgcccgatagattcagcggcagcggaagtggcaccgacttcaccctgaccatcagttctcttcaggccgaggacgtggccgtgtactactgccagaacgactacagctaccccctgaccttcggccagggcaccaaggtggaaatcaagggcggaggcggaagtggaggcggaggatctggcggcggaggctctcaggtgcagctggtgcagtctggggccgaagtgaagaaaaccggcagcagcgtgaaggtgtcctgcaaggccagcggctacacctttaccgaccacgccattcacgtgtggcggcaggctccaggacaggccctggaatggatgggccacttcagccccggcaacaccgacatcaagtacaacgacaagttcaagggcagagtgaccctgaccgtggaccgcagcatgagcaccgcctacatggaactgagcagcctgcggagcgaggacaccgccatgtactattgcaagaccagcaccttctttttcgactactggggccagggaacaatggtcaccgtgtccagcacgcgtgagcagaaactgatctcggaagaggatctggcgaagcccaccacgacgccagcgccgcgaccaccaacaccggcgcccaccatcgcgtcgcagcccctgtccctgcgcccagaggcgtgccggccagcggcggggggcgcagtgcacacgagggggctggacttcgcctgtgacatctacatctgggcgcccttggccgggacttgtggggtccttctcctgtcactggttatcaccctttactgcaaacggggcagaaagaaactcctgtatatattcaaacaaccatttatgagaccagtacaaactactcaagaggaagatggctgtagctgccgatttccagaagaagaagaaggaggatgtgaactgagagtgaagttcagcaggagcgcagacgcccccgcgtaccagcagggccagaaccagctctataacgagctgaatctaggacgaagagaggagtacgatgttttggacaagagacgtggccgggaccctgagatggggggaaagccgagaaggaagaaccctcaggaaggcctgtacaatgaactgcagaaagataagatggcggaggcctacagtgagattgggatgaaaggcgagcgccggaggggcaaggggcacgatggcctttaccagggtctcagtacagccaccaaggacacctacgacgcccttcacatgcaggccctgccccctcgctctagtggctccggcgagggcagaggaagtctactaacctgcggagatgtggaagaaaatcctggcccacatatgaccgagtacaagcccacggtgcgcctcgccacccgcgacgacgtccccagggccgtacgcaccctcgccgccgcgttcgccgactaccccgccacgcgccacaccgtcgatccggaccgccacatcgagcgggtcaccgagctgcaagaactcttcctcacgcgcgtcgggctcgacatcggcaaggtgtgggtcgcggacgacggcgccgcggtggcggtctggaccacgccggagagcgtcgaagcgggggcggtgttcgccgagatcggcccgcgcatggccgagttgagcggttcccggctggccgcgcagcaacagatggaaggcctcctggcgccgcaccggcccaaggagcccgcgtggttcctggccaccgtcggcgtctcgcccgaccaccagggcaagggtctgggcagcgccgtcgtgctccccggagtggaggcggccgagcgcgccggggtgcccgccttcctggagacctccgcgccccgcaacctccccttctacgagcggctcggcttcaccgtcaccgccgacgtcgaggtgcccgaaggaccgcgcacctggtgcatgacccgcaagcccggtgcctga

SEQ ID NO: 1704 - DNA, 1947 bp, Artificial Sequence
  Synthetic Polynucleotides
atggagctgactgaattgctcctcgtggtcatgcttctcctaactgcaaggctaacgctgtccagcccggctcctcctgcttgtgacctccgagtcctcagtaaactgcttcgtgactcccatgtccttcacagcagactgagccagtgcccagaggttcaccctttgcctacacctgtcctgctgcctgctgtggactttagcttgggagaatggaaaacccagatggaggagaccaaggcacaggacattctgggagcagtgacccttctgctggagggagtgatggcagcacggggacaactgggacccacttgcctctcatccctcctggggcagctttctggacaggtccgtctcctccttggggccctgcagagcctccttggaacccagcttcctccacagggcaggaccacagctcacaaggaccctaatgccatcttcctgagcttccaacacctgctccgaggaaaggtgcgtttcctgatgcttgtaggagggtccaccctctgcgtcaggcgggccccacccaccacagctgtccccagcagaacctctacgcgtgagcagaaactgatctcggaagaggatctggcgaagcccaccacgacgccagcgccgcgaccaccaacaccggcgcccaccatcgcgtcgcagcccctgtccctgcgcccagaggcgtgccggccagcggcggggggcgcagtgcacacgagggggctggacttcgcctgtgacatctacatctgggcgcccttggccgggacttgtggggtccttctcctgtcactggttatcaccctttactgcaaacggggcagaaagaaactcctgtatatattcaaacaaccatttatgagaccagtacaaactactcaagaggaagatggctgtagctgccgatttccagaagaagaagaaggaggatgtgaactgagagtgaagttcagcaggagcgcagacgcccccgcgtaccagcagggccagaaccagctctataacgagctgaatctaggacgaagagaggagtacgatgttttggacaagagacgtggccgggaccctgagatggggggaaagccgagaaggaagaaccctcaggaaggcctgtacaatgaactgcagaaagataagatggcggaggcctacagtgagattgggatgaaaggcgagcgccggaggggcaaggggcacgatggcctttaccagggtctcagtacagccaccaaggacacctacgacgcccttcacatgcaggccctgccccctcgctctagtggctccggcgagggcagaggaagtctactaacctgcggagatgtggaagaaaatcctggcccacatatgaccgagtacaagcccacggtgcgcctcgccacccgcgacgacgtccccagggccgtacgcaccctcgccgccgcgttcgccgactaccccgccacgcgccacaccgtcgatccggaccgccacatcgagcgggtcaccgagctgcaagaactcttcctcacgcgcgtcgggctcgacatcggcaaggtgtgggtcgcggacgacggcgccgcggtggcggtctggaccacgccggagagcgtcgaagcgggggcggtgttcgccgagatcggcccgcgcatggccgagttgagcggttcccggctggccgcgcagcaacagatggaaggcctcctggcgccgcaccggcccaaggagcccgcgtggttcctggccaccgtcggcgtctcgcccgaccaccagggcaagggtctgggcagcgccgtcgtgctccccggagtggaggcggccgagcgcgccggggtgcccgccttcctggagacctccgcgccccgcaacctccccttctacgagcggctcggcttcaccgtcaccgccgacgtcgaggtgcccgaaggaccgcgcacctggtgcatgacccgcaagcccggtgcctga

SEQ ID NO: 1705 - DNA, 2178 bp, Artificial Sequence
  Synthetic Polynucleotides
atggccttaccagtgaccgccttgctcctgccgctggccttgctgctccacgccgccaggccggacatccagatgacccagagccccagcagcctgtctgccagcgtgggcgacagagtgaccatcacatgcaaggccagccaggacgtgtccattgccgtggcctggtatcagcagaagcccggcaaggcccccaaggtgctgatctacagcgccagctacagatacaccggcgtgcccgacagattcagcggctctggcagcggcaccgacttcaccttcaccatcagctccctccagcccgaggatattgccgtgtactactgccagcagcactacatcacccccctgacctttggcggaggcaccaaggtggaaatcaagggcggaggcggaagtggaggcggaggatctggcggcggaggctctcagatccaactggtgcagagcggccacgaagtgaagaaacctggggccagcgtgaaggtgtcctgcaaagccagcggctacacctttaccaactacggcatgaactgggtgcgccaggcccctggacagggcctggaatggatgggctggatcaacaccaagaccggcgagcccacctacgccgaagagttcaagggcagattcgtgttcagcctggaaaccagcgcctccaccgcctacctccagatcagctctctgaaggccgaggacaccgccatgtacttttgcggcagaggcggctacggcagcagctactggtacttcgatgtgtggggccagggcaccaccgtgaccgtgtcatctacgcgtgagcagaaactgatctcggaagaggatctggcgaagcccaccacgacgccagcgccgcgaccaccaacaccggcgcccaccatcgcgtcgcagcccctgtccctgcgcccagaggcgtgccggccagcggcggggggcgcagtgcacacgagggggctggacttcgcctgtgacatctacatctgggcgcccttggccgggacttgtggggtccttctcctgtcactggttatcaccctttactgcaaacggggcagaaagaaactcctgtatatattcaaacaaccatttatgagaccagtacaaactactcaagaggaagatggctgtagctgccgatttccagaagaagaagaaggaggatgtgaactgagagtgaagttcagcaggagcgcagacgcccccgcgtaccagcagggccagaaccagctctataacgagctgaatctaggacgaagagaggagtacgatgttttggacaagagacgtggccgggaccctgagatggggggaaagccgagaaggaagaaccctcaggaaggcctgtacaatgaactgcagaaagataagatggcggaggcctacagtgagattgggatgaaaggcgagcgccggaggggcaaggggcacgatggcctttaccagggtctcagtacagccaccaaggacacctacgacgcccttcacatgcaggccctgccccctcgctctagtggctccggcgagggcagaggaagtctactaacctgcggagatgtggaagaaaatcctggcccacatatgaccgagtacaagcccacggtgcgcctcgccacccgcgacgacgtccccagggccgtacgcaccctcgccgccgcgttcgccgactaccccgccacgcgccacaccgtcgatccggaccgccacatcgagcgggtcaccgagctgcaagaactcttcctcacgcgcgtcgggctcgacatcggcaaggtgtgggtcgcggacgacggcgccgcggtggcggtctggaccacgccggagagcgtcgaagcgggggcggtgttcgccgagatcggcccgcgcatggccgagttgagcggttcccggctggccgcgcagcaacagatggaaggcctcctggcgccgcaccggcccaaggagcccgcgtggttcctggccaccgtcggcgtctcgcccgaccaccagggcaagggtctgggcagcgccgtcgtgctccccggagtggaggcggccgagcgcgccggggtgcccgccttcctggagacctccgcgccccgcaacctccccttctacgagcggctcggcttcaccgtcaccgccgacgtcgaggtgcccgaaggaccgcgcacctggtgcatgacccgcaagcccggtgcctga

SEQ ID NO: 1706 - DNA, 2184 bp, Artificial Sequence
  Synthetic Polynucleotides
atggccttaccagtgaccgccttgctcctgccgctggccttgctgctccacgccgccaggccggacatcgtgatgacccagagccccgatagcctggccgtgtctctgggagagagagccaccatcaactgccgggccagcaagagcgtgtccaccagcggctacagctacatgcactggtatcagcagaagcccggccagccccccaagctgctgatctacctggcctccaacctggaaagcggcgtgcccgatagattcagcggcagcggctctggcaccgacttcaccctgaccatcagttctcttcaggccgaggacgtggccgtgtactactgccagcacagcagagagctgccctacaccttcggccagggcaccaagctggaaatcaagggcggaggcggaagtggaggcggaggatctggcggcggaggctctcaggtgcaactccaggaatctggccctggccttgtgaagcccagcgagacactgagcctgacctgtaccgtgtccggcggcagcatcagctcttacggcgtgcactggattcggcagcctccaggcaagggcctggaatggatcggcgtgatctggacctccggcgtgaccgactacaacagcgccctgatgggcagagtgaccatctccgtggacaccagcaagaaccagttcagcctgaagctgagcagcgtgacagccgccgataccgccgtgtattattgcgccagagatggcgactacgaccgctacacaatggactactggggccagggaacccttgtgaccgtgtcctctacgcgtgagcagaaactgatctcggaagaggatctggcgaagcccaccacgacgccagcgccgcgaccaccaacaccggcgcccaccatcgcgtcgcagcccctgtccctgcgcccagaggcgtgccggccagcggcggggggcgcagtgcacacgagggggctggacttcgcctgtgacatctacatctgggcgcccttggccgggacttgtggggtccttctcctgtcactggttatcaccctttactgcaaacggggcagaaagaaactcctgtatatattcaaacaaccatttatgagaccagtacaaactactcaagaggaagatggctgtagctgccgatttccagaagaagaagaaggaggatgtgaactgagagtgaagttcagcaggagcgcagacgcccccgcgtaccagcagggccagaaccagctctataacgagctgaatctaggacgaagagaggagtacgatgttttggacaagagacgtggccgggaccctgagatggggggaaagccgagaaggaagaaccctcaggaaggcctgtacaatgaactgcagaaagataagatggcggaggcctacagtgagattgggatgaaaggcgagcgccggaggggcaaggggcacgatggcctttaccagggtctcagtacagccaccaaggacacctacgacgcccttcacatgcaggccctgccccctcgctctagtggctccggcgagggcagaggaagtctactaacctgcggagatgtggaagaaaatcctggcccacatatgaccgagtacaagcccacggtgcgcctcgccacccgcgacgacgtccccagggccgtacgcaccctcgccgccgcgttcgccgactaccccgccacgcgccacaccgtcgatccggaccgccacatcgagcgggtcaccgagctgcaagaactcttcctcacgcgcgtcgggctcgacatcggcaaggtgtgggtcgcggacgacggcgccgcggtggcggtctggaccacgccggagagcgtcgaagcgggggcggtgttcgccgagatcggcccgcgcatggccgagttgagcggttcccggctggccgcgcagcaacagatggaaggcctcctggcgccgcaccggcccaaggagcccgcgtggttcctggccaccgtcggcgtctcgcccgaccaccagggcaagggtctgggcagcgccgtcgtgctccccggagtggaggcggccgagcgcgccggggtgcccgccttcctggagacctccgcgccccgcaacctccccttctacgagcggctcggcttcaccgtcaccgccgacgtcgaggtgcccgaaggaccgcgcacctggtgcatgacccgcaagcccggtgcctga

SEQ ID NO: 1707 - DNA, 2121 bp, Artificial Sequence
  Synthetic Polynucleotides
atgacagccctgttcctgatgtccatgctgttcggcctggcctgcggacaggccatgtctttctgtatccccaccgagtacaccatgcacatcgagagaagagagtgcgcctactgcctgaccatcaacaccacaatctgcgccggctactgcatgacacgggatattaacggcaagctgttcctgcctaagtacgccctgagccaggacgtgtgcacctaccgggacttcatctaccggaccgtggaaatccctggctgccctctgcatgtggccccttactttagctaccccgtggctctgagctgcaagtgcggcaagtgcaacaccgactacagcgactgtatccacgaggccatcaagaccaactactgcaccaagcctcagaaaagctacctcgtgggcttctctgttggcggaggcggaagtggaggcggaggatctggcggcggaggctctgctcctgatgtgcaggattgccctgagtgcaccctgcaagagaaccccttcttctcccaacctggcgctcctatcctccagtgcatgggctgctgcttcagccgggcttatcccacacctctgcggagcaagaaaaccatgctggtccagaaaaacgtgaccagcgagagcacctgttgtgtggctaagagctacaacagagtgaccgtgatgggcggcttcaaggtggaaaatcacaccgcctgccactgctccacctgttactaccacaagagcacgcgtgagcagaaactgatctcggaagaggatctggcgaagcccaccacgacgccagcgccgcgaccaccaacaccggcgcccaccatcgcgtcgcagcccctgtccctgcgcccagaggcgtgccggccagcggcggggggcgcagtgcacacgagggggctggacttcgcctgtgacatctacatctgggcgcccttggccgggacttgtggggtccttctcctgtcactggttatcaccctttactgcaaacggggcagaaagaaactcctgtatatattcaaacaaccatttatgagaccagtacaaactactcaagaggaagatggctgtagctgccgatttccagaagaagaagaaggaggatgtgaactgagagtgaagttcagcaggagcgcagacgcccccgcgtaccagcagggccagaaccagctctataacgagctgaatctaggacgaagagaggagtacgatgttttggacaagagacgtggccgggaccctgagatggggggaaagccgagaaggaagaaccctcaggaaggcctgtacaatgaactgcagaaagataagatggcggaggcctacagtgagattgggatgaaaggcgagcgccggaggggcaaggggcacgatggcctttaccagggtctcagtacagccaccaaggacacctacgacgcccttcacatgcaggccctgccccctcgctctagtggctccggcgagggcagaggaagtctactaacctgcggagatgtggaagaaaatcctggcccacatatgaccgagtacaagcccacggtgcgcctcgccacccgcgacgacgtccccagggccgtacgcaccctcgccgccgcgttcgccgactaccccgccacgcgccacaccgtcgatccggaccgccacatcgagcgggtcaccgagctgcaagaactcttcctcacgcgcgtcgggctcgacatcggcaaggtgtgggtcgcggacgacggcgccgcggtggcggtctggaccacgccggagagcgtcgaagcgggggcggtgttcgccgagatcggcccgcgcatggccgagttgagcggttcccggctggccgcgcagcaacagatggaaggcctcctggcgccgcaccggcccaaggagcccgcgtggttcctggccaccgtcggcgtctcgcccgaccaccagggcaagggtctgggcagcgccgtcgtgctccccggagtggaggcggccgagcgcgccggggtgcccgccttcctggagacctccgcgccccgcaacctccccttctacgagcggctcggcttcaccgtcaccgccgacgtcgaggtgcccgaaggaccgcgcacctggtgcatgacccgcaagcccggtgcctga

SEQ ID NO: 1708 - DNA, 2172 bp, Artificial Sequence
  Synthetic Polynucleotides
atggccttaccagtgaccgccttgctcctgccgctggccttgctgctccacgccgccaggccgcagagcgtgctgacacagcctcctagcgtgtccgtgtctcctggccagaccgccagcatcacctgtagcggcgataagctgggcgataagtacgcctgctggtatcagcagaagcccggccagtctcccgtgctcgtgatctaccaggacagcaagaggcccagcggcatccccgagagattcagcggcagcaacagcggcaataccgccaccctgaccatcagcggcacccaggctatggacgaggccgactactactgccaggcttgggatagcagcaccgccgtggtgtttggcggaggcaccaagctgacagtgctgggcggaggcggaagtggaggcggaggatctggcggcggaggctctcaggtgcagctggtgcagtctggggccgaagtgaagaagcctggacagagcctgaagatcagctgcaaggccagcggctacagcctgaccgacaactggattggctgggtgcgccagaagccaggcaagggcctggaatggatgggcatcatctaccccggcgacagcgacaccagatacagccctagcttccagggccaagtgaccatctccgccgacaagagcatcaacaccgcctacctccagtggtccagcctgaaagcctccgacaccgccatctactactgtgtgggactggactggaactacaaccccctgcggtactggggacctggcacactcgtgaccgtgtcctctacgcgtgagcagaaactgatctcggaagaggatctggcgaagcccaccacgacgccagcgccgcgaccaccaacaccggcgcccaccatcgcgtcgcagcccctgtccctgcgcccagaggcgtgccggccagcggcggggggcgcagtgcacacgagggggctggacttcgcctgtgacatctacatctgggcgcccttggccgggacttgtggggtccttctcctgtcactggttatcaccctttactgcaaacggggcagaaagaaactcctgtatatattcaaacaaccatttatgagaccagtacaaactactcaagaggaagatggctgtagctgccgatttccagaagaagaagaaggaggatgtgaactgagagtgaagttcagcaggagcgcagacgcccccgcgtaccagcagggccagaaccagctctataacgagctgaatctaggacgaagagaggagtacgatgttttggacaagagacgtggccgggaccctgagatggggggaaagccgagaaggaagaaccctcaggaaggcctgtacaatgaactgcagaaagataagatggcggaggcctacagtgagattgggatgaaaggcgagcgccggaggggcaaggggcacgatggcctttaccagggtctcagtacagccaccaaggacacctacgacgcccttcacatgcaggccctgccccctcgctctagtggctccggcgagggcagaggaagtctactaacctgcggagatgtggaagaaaatcctggcccacatatgaccgagtacaagcccacggtgcgcctcgccacccgcgacgacgtccccagggccgtacgcaccctcgccgccgcgttcgccgactaccccgccacgcgccacaccgtcgatccggaccgccacatcgagcgggtcaccgagctgcaagaactcttcctcacgcgcgtcgggctcgacatcggcaaggtgtgggtcgcggacgacggcgccgcggtggcggtctggaccacgccggagagcgtcgaagcgggggcggtgttcgccgagatcggcccgcgcatggccgagttgagcggttcccggctggccgcgcagcaacagatggaaggcctcctggcgccgcaccggcccaaggagcccgcgtggttcctggccaccgtcggcgtctcgcccgaccaccagggcaagggtctgggcagcgccgtcgtgctccccggagtggaggcggccgagcgcgccggggtgcccgccttcctggagacctccgcgccccgcaacctccccttctacgagcggctcggcttcaccgtcaccgccgacgtcgaggtgcccgaaggaccgcgcacctggtgcatgacccgcaagcccggtgcctga

SEQ ID NO: 1709 - DNA, 2166 bp, Artificial Sequence
  Synthetic Polynucleotides
atggccttaccagtgaccgccttgctcctgccgctggccttgctgctccacgccgccaggccggacatcgtgatgacccagagccagaaattcatgagcaccagcgtgggcgaccgggtgtccatcatctgcaaggccagccagaacgtgggcaccttcgtggcctggtatcagcagaagcctggccagagccccaagctgctggtgtacagcgccagcaacagatacaccggcgtgcccgatagattcaccggcagcggctctggcaccgacttcaccctgaccatcaacaacatgcagagcgaggacctggccgactacttctgtcggcagtacagcagctacccctacaccttcggcggaggcaccaagctggaaatcaagggcggaggcggaagtggaggcggaggatctggcggcggaggctctgaagtgcaactccagcagagcggccctgagcttgtgaagccaggggccagcatgaagattagctgcaaagccagcggctacagcttcagcgcctacaccatgaactgggtcaagcagagccacggcaagaacctggaatggatcggcctgattaacccctacaacggcggcaccaactacaaccaggaatttgagggcaaggccaccctgacagtgaacaagagcagcaacaccgccttcatggaactgctgagcctgaccagcgacgacagcgccgtgtactactgcgccagacgggactgggactacttcgactattggggccagggcaccacactgaccgtgtcctctacgcgtgagcagaaactgatctcggaagaggatctggcgaagcccaccacgacgccagcgccgcgaccaccaacaccggcgcccaccatcgcgtcgcagcccctgtccctgcgcccagaggcgtgccggccagcggcggggggcgcagtgcacacgagggggctggacttcgcctgtgacatctacatctgggcgcccttggccgggacttgtggggtccttctcctgtcactggttatcaccctttactgcaaacggggcagaaagaaactcctgtatatattcaaacaaccatttatgagaccagtacaaactactcaagaggaagatggctgtagctgccgatttccagaagaagaagaaggaggatgtgaactgagagtgaagttcagcaggagcgcagacgcccccgcgtaccagcagggccagaaccagctctataacgagctgaatctaggacgaagagaggagtacgatgttttggacaagagacgtggccgggaccctgagatggggggaaagccgagaaggaagaaccctcaggaaggcctgtacaatgaactgcagaaagataagatggcggaggcctacagtgagattgggatgaaaggcgagcgccggaggggcaaggggcacgatggcctttaccagggtctcagtacagccaccaaggacacctacgacgcccttcacatgcaggccctgccccctcgctctagtggctccggcgagggcagaggaagtctactaacctgcggagatgtggaagaaaatcctggcccacatatgaccgagtacaagcccacggtgcgcctcgccacccgcgacgacgtccccagggccgtacgcaccctcgccgccgcgttcgccgactaccccgccacgcgccacaccgtcgatccggaccgccacatcgagcgggtcaccgagctgcaagaactcttcctcacgcgcgtcgggctcgacatcggcaaggtgtgggtcgcggacgacggcgccgcggtggcggtctggaccacgccggagagcgtcgaagcgggggcggtgttcgccgagatcggcccgcgcatggccgagttgagcggttcccggctggccgcgcagcaacagatggaaggcctcctggcgccgcaccggcccaaggagcccgcgtggttcctggccaccgtcggcgtctcgcccgaccaccagggcaagggtctgggcagcgccgtcgtgctccccggagtggaggcggccgagcgcgccggggtgcccgccttcctggagacctccgcgccccgcaacctccccttctacgagcggctcggcttcaccgtcaccgccgacgtcgaggtgcccgaaggaccgcgcacctggtgcatgacccgcaagcccggtgcctga

SEQ ID NO: 1710 - DNA, 2199 bp, Artificial Sequence
  Synthetic Polynucleotides
atggccttaccagtgaccgccttgctcctgccgctggccttgctgctccacgccgccaggccggccatccagatgacccagagccctagcagcctgagcgccagcgtgggcgacagagtgaccatcacctgtagagccagccagagcatcagcaactacctgaactggtatcagcagaagcccggcaaggcccccaagctgctgatctatgccgccagctctctccagagcggcgtgcccagcagattttctggcagcggctccggcaccgacttcaccctgacaatcagcagcctccagcccgaggacttcgccacctactactgccagcagagctacagcagcccctccaccacctttggacagggcaccaagctggaaatcaagagaggcggaggcggaagtggaggcggaggatctggcggcggaggctctgaagtgcagctggtggaatctggcggcggactgattcagcctggcggctctctgagactgagctgtgccgcctctggcttcaccgtgtcctccaactacatgagctgggtgcgccaggcccctggcaagggactggaatgggtgtccgtgacatacagcggcggcagcaccagctacgccgatagcgtgaagggccggttcaccatcagccgggacaacagcaagaacaccctgtacctccagatgaacagcctgcgggccgaggacaccgccgtgtactattgtgccaggggaggccggtactgctccagcatcagctgctatgccagaagcggctgcgactactggggccagggaacactcgtgaccgtgtccagtacgcgtgagcagaaactgatctcggaagaggatctggcgaagcccaccacgacgccagcgccgcgaccaccaacaccggcgcccaccatcgcgtcgcagcccctgtccctgcgcccagaggcgtgccggccagcggcggggggcgcagtgcacacgagggggctggacttcgcctgtgacatctacatctgggcgcccttggccgggacttgtggggtccttctcctgtcactggttatcaccctttactgcaaacggggcagaaagaaactcctgtatatattcaaacaaccatttatgagaccagtacaaactactcaagaggaagatggctgtagctgccgatttccagaagaagaagaaggaggatgtgaactgagagtgaagttcagcaggagcgcagacgcccccgcgtaccagcagggccagaaccagctctataacgagctgaatctaggacgaagagaggagtacgatgttttggacaagagacgtggccgggaccctgagatggggggaaagccgagaaggaagaaccctcaggaaggcctgtacaatgaactgcagaaagataagatggcggaggcctacagtgagattgggatgaaaggcgagcgccggaggggcaaggggcacgatggcctttaccagggtctcagtacagccaccaaggacacctacgacgcccttcacatgcaggccctgccccctcgctctagtggctccggcgagggcagaggaagtctactaacctgcggagatgtggaagaaaatcctggcccacatatgaccgagtacaagcccacggtgcgcctcgccacccgcgacgacgtccccagggccgtacgcaccctcgccgccgcgttcgccgactaccccgccacgcgccacaccgtcgatccggaccgccacatcgagcgggtcaccgagctgcaagaactcttcctcacgcgcgtcgggctcgacatcggcaaggtgtgggtcgcggacgacggcgccgcggtggcggtctggaccacgccggagagcgtcgaagcgggggcggtgttcgccgagatcggcccgcgcatggccgagttgagcggttcccggctggccgcgcagcaacagatggaaggcctcctggcgccgcaccggcccaaggagcccgcgtggttcctggccaccgtcggcgtctcgcccgaccaccagggcaagggtctgggcagcgccgtcgtgctccccggagtggaggcggccgagcgcgccggggtgcccgccttcctggagacctccgcgccccgcaacctccccttctacgagcggctcggcttcaccgtcaccgccgacgtcgaggtgcccgaaggaccgcgcacctggtgcatgacccgcaagcccggtgcctga

SEQ ID NO: 1711 - DNA, 2184 bp, Artificial Sequence
  Synthetic Polynucleotides
atggccttaccagtgaccgccttgctcctgccgctggccttgctgctccacgccgccaggccggacatccagatgacccagagccccagcagcctgtctgccagcgtgggcgacagagtgaccatcacctgtagagccagccagagcatcggcaccagcctgcactggtatcagcagaagcctggcaaggcccccaagctgctgattaagttcgccagcagactgcagagcggcgtgcccagcagattttctggcagcggctccggcaccgacttcaccctgacaatcagctccctgcagcccgaggacttcgccacctactactgccagcagagccccggcttccctccaacctttggacagggcaccaagctggaaatcaagcggggcggaggcggaagtggaggcggaggatctggcggcggaggctctcaggtgcaactggtggaatctggcggcggacttgtgaagccaggcggcagcctgagactgagctgtgccgccagcggcttcagcatcaccaccagcggctactactggacctggatcagacagttccccggcaagggcctggaatggatgggctacatcggctacaacagcaagacctactacaaccccgccctgaagtcccggatcaccatcagcagagacaacgccaagaacagcctgtacctgcagatgaactccctgagagccgaggataccgccgtgtactactgcgccagatccctgtacggcggctacaaggacgccttcgatagctggggccagggaacccttgtgaccgtgtctagcacgcgtgagcagaaactgatctcggaagaggatctggcgaagcccaccacgacgccagcgccgcgaccaccaacaccggcgcccaccatcgcgtcgcagcccctgtccctgcgcccagaggcgtgccggccagcggcggggggcgcagtgcacacgagggggctggacttcgcctgtgacatctacatctgggcgcccttggccgggacttgtggggtccttctcctgtcactggttatcaccctttactgcaaacggggcagaaagaaactcctgtatatattcaaacaaccatttatgagaccagtacaaactactcaagaggaagatggctgtagctgccgatttccagaagaagaagaaggaggatgtgaactgagagtgaagttcagcaggagcgcagacgcccccgcgtaccagcagggccagaaccagctctataacgagctgaatctaggacgaagagaggagtacgatgttttggacaagagacgtggccgggaccctgagatggggggaaagccgagaaggaagaaccctcaggaaggcctgtacaatgaactgcagaaagataagatggcggaggcctacagtgagattgggatgaaaggcgagcgccggaggggcaaggggcacgatggcctttaccagggtctcagtacagccaccaaggacacctacgacgcccttcacatgcaggccctgccccctcgctctagtggctccggcgagggcagaggaagtctactaacctgcggagatgtggaagaaaatcctggcccacatatgaccgagtacaagcccacggtgcgcctcgccacccgcgacgacgtccccagggccgtacgcaccctcgccgccgcgttcgccgactaccccgccacgcgccacaccgtcgatccggaccgccacatcgagcgggtcaccgagctgcaagaactcttcctcacgcgcgtcgggctcgacatcggcaaggtgtgggtcgcggacgacggcgccgcggtggcggtctggaccacgccggagagcgtcgaagcgggggcggtgttcgccgagatcggcccgcgcatggccgagttgagcggttcccggctggccgcgcagcaacagatggaaggcctcctggcgccgcaccggcccaaggagcccgcgtggttcctggccaccgtcggcgtctcgcccgaccaccagggcaagggtctgggcagcgccgtcgtgctccccggagtggaggcggccgagcgcgccggggtgcccgccttcctggagacctccgcgccccgcaacctccccttctacgagcggctcggcttcaccgtcaccgccgacgtcgaggtgcccgaaggaccgcgcacctggtgcatgacccgcaagcccggtgcctga

SEQ ID NO: 1712 - DNA, 2199 bp, Artificial Sequence
  Synthetic Polynucleotides
atggccttaccagtgaccgccttgctcctgccgctggccttgctgctccacgccgccaggccggacgagatcgtgctgacccagagccctctgagcctgcctgtgacacctggcgagcctgccagcatctcctgtagaagcagccagagcctgctgcacagcatcggctacaactacctggactggtatctccagaagcccggccagagcccccaactgctgatctacctgggcagcaacagagccagcggcgtgcccgatagattttccggcagcggctccggcaccgacttcaccctgaagatcagccgggtggaagccgaggacgtgggcgtgtactactgtatgcaggccctccagacccccctgacctttggcggaggcaccaaggtggaaatcaagcggggcggaggcggaagtggaggcggaggatctggcggcggaggctctgaagtgcaactggtggaaagcggaggcggcgtggtgcagcctggaagaagcctgagactgagctgtgccgccagcggcttcaccttccggtcctacggaatgcactgggtgcgccaggcccctggcaaaggactggaatgggtggccgtgatctcctacgacggctccaacaagtactacaccgacagcgtgaacggcagattcaccatcagcagagacaacagcaagaacaccctgtacctccagatgaacagcctgcgggccgaggacaccgccgtgtactattgtgctagaggcggaggctactacgagacaagcggccctgattactggggccagggcacactcgtgaccgtgtctagtacgcgtgagcagaaactgatctcggaagaggatctggcgaagcccaccacgacgccagcgccgcgaccaccaacaccggcgcccaccatcgcgtcgcagcccctgtccctgcgcccagaggcgtgccggccagcggcggggggcgcagtgcacacgagggggctggacttcgcctgtgacatctacatctgggcgcccttggccgggacttgtggggtccttctcctgtcactggttatcaccctttactgcaaacggggcagaaagaaactcctgtatatattcaaacaaccatttatgagaccagtacaaactactcaagaggaagatggctgtagctgccgatttccagaagaagaagaaggaggatgtgaactgagagtgaagttcagcaggagcgcagacgcccccgcgtaccagcagggccagaaccagctctataacgagctgaatctaggacgaagagaggagtacgatgttttggacaagagacgtggccgggaccctgagatggggggaaagccgagaaggaagaaccctcaggaaggcctgtacaatgaactgcagaaagataagatggcggaggcctacagtgagattgggatgaaaggcgagcgccggaggggcaaggggcacgatggcctttaccagggtctcagtacagccaccaaggacacctacgacgcccttcacatgcaggccctgccccctcgctctagtggctccggcgagggcagaggaagtctactaacctgcggagatgtggaagaaaatcctggcccacatatgaccgagtacaagcccacggtgcgcctcgccacccgcgacgacgtccccagggccgtacgcaccctcgccgccgcgttcgccgactaccccgccacgcgccacaccgtcgatccggaccgccacatcgagcgggtcaccgagctgcaagaactcttcctcacgcgcgtcgggctcgacatcggcaaggtgtgggtcgcggacgacggcgccgcggtggcggtctggaccacgccggagagcgtcgaagcgggggcggtgttcgccgagatcggcccgcgcatggccgagttgagcggttcccggctggccgcgcagcaacagatggaaggcctcctggcgccgcaccggcccaaggagcccgcgtggttcctggccaccgtcggcgtctcgcccgaccaccagggcaagggtctgggcagcgccgtcgtgctccccggagtggaggcggccgagcgcgccggggtgcccgccttcctggagacctccgcgccccgcaacctccccttctacgagcggctcggcttcaccgtcaccgccgacgtcgaggtgcccgaaggaccgcgcacctggtgcatgacccgcaagcccggtgcctga

SEQ ID NO: 1713 - DNA, 2193 bp, Artificial Sequence
  Synthetic Polynucleotides
atggccttaccagtgaccgccttgctcctgccgctggccttgctgctccacgccgccaggccggacgacgtcgtgatgacccagagccctctgagcctgcctgtgacacctggcgagcctgccagcatctcctgtagaagcagccagagcctgctgcacagcatcggctacaactacctgcactggtttctccagaagcccggccagagcccccaactgctgatctacctgggcagcaacagagccagcggcgtgcccgatagattttccggcagcggctccggcaccgacttcaccctgaagatcagccgggtggaagccgaggacgtgggcgtgtactactgtatgcaggccctccagacccctcccacctttggacagggcaccagactggaaatcaagcggggcggaggcggaagtggaggcggaggatctggcggcggaggctctcaactccaactccaggaaagcggccctggcctcgtgaagcctagcggcacactgagcctgacatgtgccgtgtctggcggcagcatcagcagcagcaactggtggtcttgggtgcgccagcctcctggcaagggcctggaatggatcggcgaaatctaccacagcggcagcaccaactacaaccccagcctgaagtccagagtgaccatcagcgtggacaagagcaagaaccagttctccctgaagctgagcagcgtgacagccgccgataccgccgtgtactattgcgtgggcagcccctacggcgactacgtgctggattattggggccagggcaccctcgtgaccgtgtctagtacgcgtgagcagaaactgatctcggaagaggatctggcgaagcccaccacgacgccagcgccgcgaccaccaacaccggcgcccaccatcgcgtcgcagcccctgtccctgcgcccagaggcgtgccggccagcggcggggggcgcagtgcacacgagggggctggacttcgcctgtgacatctacatctgggcgcccttggccgggacttgtggggtccttctcctgtcactggttatcaccctttactgcaaacggggcagaaagaaactcctgtatatattcaaacaaccatttatgagaccagtacaaactactcaagaggaagatggctgtagctgccgatttccagaagaagaagaaggaggatgtgaactgagagtgaagttcagcaggagcgcagacgcccccgcgtaccagcagggccagaaccagctctataacgagctgaatctaggacgaagagaggagtacgatgttttggacaagagacgtggccgggaccctgagatggggggaaagccgagaaggaagaaccctcaggaaggcctgtacaatgaactgcagaaagataagatggcggaggcctacagtgagattgggatgaaaggcgagcgccggaggggcaaggggcacgatggcctttaccagggtctcagtacagccaccaaggacacctacgacgcccttcacatgcaggccctgccccctcgctctagtggctccggcgagggcagaggaagtctactaacctgcggagatgtggaagaaaatcctggcccacatatgaccgagtacaagcccacggtgcgcctcgccacccgcgacgacgtccccagggccgtacgcaccctcgccgccgcgttcgccgactaccccgccacgcgccacaccgtcgatccggaccgccacatcgagcgggtcaccgagctgcaagaactcttcctcacgcgcgtcgggctcgacatcggcaaggtgtgggtcgcggacgacggcgccgcggtggcggtctggaccacgccggagagcgtcgaagcgggggcggtgttcgccgagatcggcccgcgcatggccgagttgagcggttcccggctggccgcgcagcaacagatggaaggcctcctggcgccgcaccggcccaaggagcccgcgtggttcctggccaccgtcggcgtctcgcccgaccaccagggcaagggtctgggcagcgccgtcgtgctccccggagtggaggcggccgagcgcgccggggtgcccgccttcctggagacctccgcgccccgcaacctccccttctacgagcggctcggcttcaccgtcaccgccgacgtcgaggtgcccgaaggaccgcgcacctggtgcatgacccgcaagcccggtgcctga

SEQ ID NO: 1714 - DNA, 2202 bp, Artificial Sequence
  Synthetic Polynucleotides
atggccttaccagtgaccgccttgctcctgccgctggccttgctgctccacgccgccaggccggacgtcgtgatgacccagagccctctgagcctgcctgtgacacctggcgagcctgccagcatcagctgtagaagcagccagagcctgctgcacagcaacggccacaactacctggactggtatctccagaagcccggccagagcccccagctgctgatctacctgggcagcaatagagccagcggcgtgcccgatagattcagcggctctggaagcggcaccgacttcaccctgaagatcagccgggtggaagccgaggacgtgggcgtgtactactgtatgcagaccctccagacccccctgacctttggccctggcaccaaggtggacatcaagagaggcggaggcggaagtggaggcggaggatctggcggcggaggctctgaagtgcagctggtggaaacaggcggaggcgtggtgcagcctggcagaagcctgagactgagctgtgccgccagcggcttcaccttcagcagctacggaatgcactgggtgcgccaggcccctggcaaaggactggaatgggtggccgtgatctcctacgacggcagcaacaagtattacgccgacagcgtgaagggccggttcaccatctccagagacaacagcaagaacaccctgtacctccagatgaacagcctgcgggccgaggacaccgccgtgtactattgcgccaaggacagatacggctggggcagcagcttcggccacttcgattattggggccagggcaccctcgtgaccgtgtctagtacgcgtgagcagaaactgatctcggaagaggatctggcgaagcccaccacgacgccagcgccgcgaccaccaacaccggcgcccaccatcgcgtcgcagcccctgtccctgcgcccagaggcgtgccggccagcggcggggggcgcagtgcacacgagggggctggacttcgcctgtgacatctacatctgggcgcccttggccgggacttgtggggtccttctcctgtcactggttatcaccctttactgcaaacggggcagaaagaaactcctgtatatattcaaacaaccatttatgagaccagtacaaactactcaagaggaagatggctgtagctgccgatttccagaagaagaagaaggaggatgtgaactgagagtgaagttcagcaggagcgcagacgcccccgcgtaccagcagggccagaaccagctctataacgagctgaatctaggacgaagagaggagtacgatgttttggacaagagacgtggccgggaccctgagatggggggaaagccgagaaggaagaaccctcaggaaggcctgtacaatgaactgcagaaagataagatggcggaggcctacagtgagattgggatgaaaggcgagcgccggaggggcaaggggcacgatggcctttaccagggtctcagtacagccaccaaggacacctacgacgcccttcacatgcaggccctgccccctcgctctagtggctccggcgagggcagaggaagtctactaacctgcggagatgtggaagaaaatcctggcccacatatgaccgagtacaagcccacggtgcgcctcgccacccgcgacgacgtccccagggccgtacgcaccctcgccgccgcgttcgccgactaccccgccacgcgccacaccgtcgatccggaccgccacatcgagcgggtcaccgagctgcaagaactcttcctcacgcgcgtcgggctcgacatcggcaaggtgtgggtcgcggacgacggcgccgcggtggcggtctggaccacgccggagagcgtcgaagcgggggcggtgttcgccgagatcggcccgcgcatggccgagttgagcggttcccggctggccgcgcagcaacagatggaaggcctcctggcgccgcaccggcccaaggagcccgcgtggttcctggccaccgtcggcgtctcgcccgaccaccagggcaagggtctgggcagcgccgtcgtgctccccggagtggaggcggccgagcgcgccggggtgcccgccttcctggagacctccgcgccccgcaacctccccttctacgagcggctcggcttcaccgtcaccgccgacgtcgaggtgcccgaaggaccgcgcacctggtgcatgacccgcaagcccggtgcctga

SEQ ID NO: 1715 - DNA, 2187 bp, Artificial Sequence
  Synthetic Polynucleotides
atggccttaccagtgaccgccttgctcctgccgctggccttgctgctccacgccgccaggccggacgagatcgtgctgacacagagccctggcaccctgagcctgtctctgggagagagagccacactgagctgtcgggccagccagtctatcagcagcagcttcctggcctggtatcagcagaagcccggccaggcccctaagctgctgatctacgccgccagcacaagagccaccggcatccccgatagattcagcggctctggcagcggcaccgacttcaccctgaccatcagcagactggaacccgaggacttcgccgtgtactactgccagcagtacggcagaagcctgagcttcggcggaggcaccaaggtggaagtgaagggcggaggcggaagtggaggcggaggatctggcggcggaggctctcaggtgcaactccagcagtctggccccggactcgtgaagcctagccagacactgagcctgacctgcgccatcagcggcgatagcgtgtccggcaatagcgccacctggaactggatcagacagagcccatctcggggcctggaatggctgggccggacctactaccgcagcaagtggaaccacgactacgccgagagcgtgaagtcccggatcaccatcaaccccgacaccagcaagaaccagttctccttgcaactgaacagcgtgacccccgaggacacagccgtgtattattgcgccagaggcgacagcagctcttggtacgccttcgactattggggccagggcaccctcgtgaccgtgtctagtacgcgtgagcagaaactgatctcggaagaggatctggcgaagcccaccacgacgccagcgccgcgaccaccaacaccggcgcccaccatcgcgtcgcagcccctgtccctgcgcccagaggcgtgccggccagcggcggggggcgcagtgcacacgagggggctggacttcgcctgtgacatctacatctgggcgcccttggccgggacttgtggggtccttctcctgtcactggttatcaccctttactgcaaacggggcagaaagaaactcctgtatatattcaaacaaccatttatgagaccagtacaaactactcaagaggaagatggctgtagctgccgatttccagaagaagaagaaggaggatgtgaactgagagtgaagttcagcaggagcgcagacgcccccgcgtaccagcagggccagaaccagctctataacgagctgaatctaggacgaagagaggagtacgatgttttggacaagagacgtggccgggaccctgagatggggggaaagccgagaaggaagaaccctcaggaaggcctgtacaatgaactgcagaaagataagatggcggaggcctacagtgagattgggatgaaaggcgagcgccggaggggcaaggggcacgatggcctttaccagggtctcagtacagccaccaaggacacctacgacgcccttcacatgcaggccctgccccctcgctctagtggctccggcgagggcagaggaagtctactaacctgcggagatgtggaagaaaatcctggcccacatatgaccgagtacaagcccacggtgcgcctcgccacccgcgacgacgtccccagggccgtacgcaccctcgccgccgcgttcgccgactaccccgccacgcgccacaccgtcgatccggaccgccacatcgagcgggtcaccgagctgcaagaactcttcctcacgcgcgtcgggctcgacatcggcaaggtgtgggtcgcggacgacggcgccgcggtggcggtctggaccacgccggagagcgtcgaagcgggggcggtgttcgccgagatcggcccgcgcatggccgagttgagcggttcccggctggccgcgcagcaacagatggaaggcctcctggcgccgcaccggcccaaggagcccgcgtggttcctggccaccgtcggcgtctcgcccgaccaccagggcaagggtctgggcagcgccgtcgtgctccccggagtggaggcggccgagcgcgccggggtgcccgccttcctggagacctccgcgccccgcaacctccccttctacgagcggctcggcttcaccgtcaccgccgacgtcgaggtgcccgaaggaccgcgcacctggtgcatgacccgcaagcccggtgcctga

SEQ ID NO: 1716 - DNA, 2187 bp, Artificial Sequence
  Synthetic Polynucleotides
atggccttaccagtgaccgccttgctcctgccgctggccttgctgctccacgccgccaggccggaccagaccgtcgtgacacagcctcctagcgcctctggcacaccaggccagagagtgaccatctcctgtagcggcagcagcagcaacatcggcagcaactacgtgtactggtatcagcaactgcccggcaccgcccccaagctgctgatctacagaagcaaccagcggcccagcggcgtgcccgatagattttctggcagcaagagcggcaccagcgccagcctggctatctctggacctagaagcgtggacgaggccgactactactgcgccgcctgggacgatagcctgaacggcgtggtgtttggcggaggcaccaagctgacagtgctgggtggcggaggcggaagtggaggcggaggatctggcggcggaggctctcaggtgcaactggtgcagtctggggccgaagtgaagaaacccggcagctccgtgaaggtgtcctgcaaggcttccggcggcaccttcagcagctacgccatttcttgggtgcgccaggcccctggacagggcctggaatggatgggcggcatcatccccatctttggcaccgccaactacgcccagaaattccagggccgcgtgaccatcaccgccgacgagtctacaagcaccgcctacatggaactgagcagcctgcggagcgaggataccgccgtgtactactgtgccagaagaatccccccctactacggcatggacgtgtggggccagggaaccaccgtgaccgtgtcatctacgcgtgagcagaaactgatctcggaagaggatctggcgaagcccaccacgacgccagcgccgcgaccaccaacaccggcgcccaccatcgcgtcgcagcccctgtccctgcgcccagaggcgtgccggccagcggcggggggcgcagtgcacacgagggggctggacttcgcctgtgacatctacatctgggcgcccttggccgggacttgtggggtccttctcctgtcactggttatcaccctttactgcaaacggggcagaaagaaactcctgtatatattcaaacaaccatttatgagaccagtacaaactactcaagaggaagatggctgtagctgccgatttccagaagaagaagaaggaggatgtgaactgagagtgaagttcagcaggagcgcagacgcccccgcgtaccagcagggccagaaccagctctataacgagctgaatctaggacgaagagaggagtacgatgttttggacaagagacgtggccgggaccctgagatggggggaaagccgagaaggaagaaccctcaggaaggcctgtacaatgaactgcagaaagataagatggcggaggcctacagtgagattgggatgaaaggcgagcgccggaggggcaaggggcacgatggcctttaccagggtctcagtacagccaccaaggacacctacgacgcccttcacatgcaggccctgccccctcgctctagtggctccggcgagggcagaggaagtctactaacctgcggagatgtggaagaaaatcctggcccacatatgaccgagtacaagcccacggtgcgcctcgccacccgcgacgacgtccccagggccgtacgcaccctcgccgccgcgttcgccgactaccccgccacgcgccacaccgtcgatccggaccgccacatcgagcgggtcaccgagctgcaagaactcttcctcacgcgcgtcgggctcgacatcggcaaggtgtgggtcgcggacgacggcgccgcggtggcggtctggaccacgccggagagcgtcgaagcgggggcggtgttcgccgagatcggcccgcgcatggccgagttgagcggttcccggctggccgcgcagcaacagatggaaggcctcctggcgccgcaccggcccaaggagcccgcgtggttcctggccaccgtcggcgtctcgcccgaccaccagggcaagggtctgggcagcgccgtcgtgctccccggagtggaggcggccgagcgcgccggggtgcccgccttcctggagacctccgcgccccgcaacctccccttctacgagcggctcggcttcaccgtcaccgccgacgtcgaggtgcccgaaggaccgcgcacctggtgcatgacccgcaagcccggtgcctga

SEQ ID NO: 1717 - DNA, 2187 bp, Artificial Sequence
  Synthetic Polynucleotides
atggccttaccagtgaccgccttgctcctgccgctggccttgctgctccacgccgccaggccggaccagagcgtcgtgacacagcctcctagcgtgtcagtggcccctggcaagaccgccagaatcacctgtggccggaacaacatcggcagcaagagcgtgcactggtatcagcagaagcccggccaggctcctgtgctggtggtgtacgacgacagcgacagacccagcggcatccccgagagattcagcggcagcaactccggcaataccgccaccctgaccatcagcagagtggaagccggcgacgaggccgactactactgccaagtgtgggacagcagcagcgatcacgtggtgtttggcggaggcaccaagctgacagtgctgggtggcggaggcggaagtggaggcggaggatctggcggcggaggctctgaagtgcaactggtgcagtctggcggaggggtcgtgcggcctggcggatctctgagactgtcttgtgccgccagcggcttcaccttcgacgactacggcatgagctgggtgcgccaggcccctggaaaaggcctggaatgggtgtccggcatcaactggaatggcggcagcaccggctacgccgattctgtgcggggcagattcaccatcagccgggacaacgccaagaacagcctgtacctgcagatgaactccctgcgggccgaggacaccgccctgtactattgcgccagagagcggggctacggctaccacgaccctcacgattattggggccagggcacccttgtcaccgtgtcctctacgcgtgagcagaaactgatctcggaagaggatctggcgaagcccaccacgacgccagcgccgcgaccaccaacaccggcgcccaccatcgcgtcgcagcccctgtccctgcgcccagaggcgtgccggccagcggcggggggcgcagtgcacacgagggggctggacttcgcctgtgacatctacatctgggcgcccttggccgggacttgtggggtccttctcctgtcactggttatcaccctttactgcaaacggggcagaaagaaactcctgtatatattcaaacaaccatttatgagaccagtacaaactactcaagaggaagatggctgtagctgccgatttccagaagaagaagaaggaggatgtgaactgagagtgaagttcagcaggagcgcagacgcccccgcgtaccagcagggccagaaccagctctataacgagctgaatctaggacgaagagaggagtacgatgttttggacaagagacgtggccgggaccctgagatggggggaaagccgagaaggaagaaccctcaggaaggcctgtacaatgaactgcagaaagataagatggcggaggcctacagtgagattgggatgaaaggcgagcgccggaggggcaaggggcacgatggcctttaccagggtctcagtacagccaccaaggacacctacgacgcccttcacatgcaggccctgccccctcgctctagtggctccggcgagggcagaggaagtctactaacctgcggagatgtggaagaaaatcctggcccacatatgaccgagtacaagcccacggtgcgcctcgccacccgcgacgacgtccccagggccgtacgcaccctcgccgccgcgttcgccgactaccccgccacgcgccacaccgtcgatccggaccgccacatcgagcgggtcaccgagctgcaagaactcttcctcacgcgcgtcgggctcgacatcggcaaggtgtgggtcgcggacgacggcgccgcggtggcggtctggaccacgccggagagcgtcgaagcgggggcggtgttcgccgagatcggcccgcgcatggccgagttgagcggttcccggctggccgcgcagcaacagatggaaggcctcctggcgccgcaccggcccaaggagcccgcgtggttcctggccaccgtcggcgtctcgcccgaccaccagggcaagggtctgggcagcgccgtcgtgctccccggagtggaggcggccgagcgcgccggggtgcccgccttcctggagacctccgcgccccgcaacctccccttctacgagcggctcggcttcaccgtcaccgccgacgtcgaggtgcccgaaggaccgcgcacctggtgcatgacccgcaagcccggtgcctga

SEQ ID NO: 1718 - DNA, 2223 bp, Artificial Sequence
  Synthetic Polynucleotides
atggccttaccagtgaccgccttgctcctgccgctggccttgctgctccacgccgccaggccggaacagaaactcatcagtgaagaagacctggaattccaggctgtcgtgacacagcctcctagcgcctctggcacaccaggccagagagtgaccatctcctgtagcggcagcagcagcaacatcggcagcaacaccgtgaactggtatcagcaggtgcccggcaccgctcccaagctgctgatctacagcaacaaccagcggcccagcggcgtgcccgatagattttctggcagcaagagcggcaccagcgccagcctggctatctctggactccagtccgaggacgaggccgactactattgcgccgcctgggacgatagcctgaacggctgggtgttcggcggaggcaccaagctgacagtgctgggcggaggcggaagtggaggcggaggatctggcggcggaggctctcagatgcaactggtgcagagcggagccgaagtgaaagagcctggcgagagcctgcggatctcctgcaagggcagcggctacagcttcaccaatttctggatctcttgggtgcgccagatgcccggcaagggcctggaatggatgggcagagtggaccccggctactcctacagcacctacagccctagcttccagggccacgtgaccatcagcgccgacaagagcaccagcaccgcctacctccagtggaacagcctgaaggccagcgacaccgccatgtactactgcgccagagtgcagtacagcggctattacgattggttcgacccctggggccagggcacactcgtgacagtgtcaagcacgcgtgagcagaaactgatctcggaagaggatctggcgaagcccaccacgacgccagcgccgcgaccaccaacaccggcgcccaccatcgcgtcgcagcccctgtccctgcgcccagaggcgtgccggccagcggcggggggcgcagtgcacacgagggggctggacttcgcctgtgacatctacatctgggcgcccttggccgggacttgtggggtccttctcctgtcactggttatcaccctttactgcaaacggggcagaaagaaactcctgtatatattcaaacaaccatttatgagaccagtacaaactactcaagaggaagatggctgtagctgccgatttccagaagaagaagaaggaggatgtgaactgagagtgaagttcagcaggagcgcagacgcccccgcgtaccagcagggccagaaccagctctataacgagctgaatctaggacgaagagaggagtacgatgttttggacaagagacgtggccgggaccctgagatggggggaaagccgagaaggaagaaccctcaggaaggcctgtacaatgaactgcagaaagataagatggcggaggcctacagtgagattgggatgaaaggcgagcgccggaggggcaaggggcacgatggcctttaccagggtctcagtacagccaccaaggacacctacgacgcccttcacatgcaggccctgccccctcgctctagtggctccggcgagggcagaggaagtctactaacctgcggagatgtggaagaaaatcctggcccacatatgaccgagtacaagcccacggtgcgcctcgccacccgcgacgacgtccccagggccgtacgcaccctcgccgccgcgttcgccgactaccccgccacgcgccacaccgtcgatccggaccgccacatcgagcgggtcaccgagctgcaagaactcttcctcacgcgcgtcgggctcgacatcggcaaggtgtgggtcgcggacgacggcgccgcggtggcggtctggaccacgccggagagcgtcgaagcgggggcggtgttcgccgagatcggcccgcgcatggccgagttgagcggttcccggctggccgcgcagcaacagatggaaggcctcctggcgccgcaccggcccaaggagcccgcgtggttcctggccaccgtcggcgtctcgcccgaccaccagggcaagggtctgggcagcgccgtcgtgctccccggagtggaggcggccgagcgcgccggggtgcccgccttcctggagacctccgcgccccgcaacctccccttctacgagcggctcggcttcaccgtcaccgccgacgtcgaggtgcccgaaggaccgcgcacctggtgcatgacccgcaagcccggtgcctga

SEQ ID NO: 1719 - DNA, 2205 bp, Artificial Sequence
  Synthetic Polynucleotides
atggccttaccagtgaccgccttgctcctgccgctggccttgctgctccacgccgccaggccggaacagaaactcatcagtgaagaagacctggaattcgacatccagatgacccagagccccagcacactgagcgccagcgtgggcgacagagtgaccatcacctgtcgggccagccagaacatcaacaagtggctggcctggtatcagcagaggcccggaaaagccccccagctgctgatctacaaggccagcagcctggaaagcggcgtgcccagcagattttctggcagcggctctggcaccgagtacaccctgaccatcagctccctccagcccgacgacttcgccacctactactgccagcagtacaacagctacgccaccttcggccagggcaccaaggtggaaatcaagagaggcggaggcggaagtggaggcggaggatctggcggcggaggctctcaggtgcagctggtgcagtctggggccgaagtgaagaagcctggcgagagcctgaagatcagctgcaagggctccggctacaacttctctaacaagtggatcggctgggtgcgccagctgcctggcagaggactggaatggatcgccatcatctaccccggctacagcgacatcacctacagccccagcttccagggccgcgtgacaatcagcgccgacaccagcatcaacaccgcctacctgcactggcacagcctgaaggccagcgacaccgccatgtactactgcgtgcggcatacagccctggctggcttcgattattggggcctgggcaccctcgtgaccgtgtctagtacgcgtgagcagaaactgatctcggaagaggatctggcgaagcccaccacgacgccagcgccgcgaccaccaacaccggcgcccaccatcgcgtcgcagcccctgtccctgcgcccagaggcgtgccggccagcggcggggggcgcagtgcacacgagggggctggacttcgcctgtgacatctacatctgggcgcccttggccgggacttgtggggtccttctcctgtcactggttatcaccctttactgcaaacggggcagaaagaaactcctgtatatattcaaacaaccatttatgagaccagtacaaactactcaagaggaagatggctgtagctgccgatttccagaagaagaagaaggaggatgtgaactgagagtgaagttcagcaggagcgcagacgcccccgcgtaccagcagggccagaaccagctctataacgagctgaatctaggacgaagagaggagtacgatgttttggacaagagacgtggccgggaccctgagatggggggaaagccgagaaggaagaaccctcaggaaggcctgtacaatgaactgcagaaagataagatggcggaggcctacagtgagattgggatgaaaggcgagcgccggaggggcaaggggcacgatggcctttaccagggtctcagtacagccaccaaggacacctacgacgcccttcacatgcaggccctgccccctcgctctagtggctccggcgagggcagaggaagtctactaacctgcggagatgtggaagaaaatcctggcccacatatgaccgagtacaagcccacggtgcgcctcgccacccgcgacgacgtccccagggccgtacgcaccctcgccgccgcgttcgccgactaccccgccacgcgccacaccgtcgatccggaccgccacatcgagcgggtcaccgagctgcaagaactcttcctcacgcgcgtcgggctcgacatcggcaaggtgtgggtcgcggacgacggcgccgcggtggcggtctggaccacgccggagagcgtcgaagcgggggcggtgttcgccgagatcggcccgcgcatggccgagttgagcggttcccggctggccgcgcagcaacagatggaaggcctcctggcgccgcaccggcccaaggagcccgcgtggttcctggccaccgtcggcgtctcgcccgaccaccagggcaagggtctgggcagcgccgtcgtgctccccggagtggaggcggccgagcgcgccggggtgcccgccttcctggagacctccgcgccccgcaacctccccttctacgagcggctcggcttcaccgtcaccgccgacgtcgaggtgcccgaaggaccgcgcacctggtgcatgacccgcaagcccggtgcctga

SEQ ID NO: 1720 - DNA, 2175 bp, Artificial Sequence
  Synthetic Polynucleotides
atggccttaccagtgaccgccttgctcctgccgctggccttgctgctccacgccgccaggccggagatcgtgctgacacagagccctggcaccctgagcctgtctccaggcgaaagagccacactgagctgtcgggccagccagagcgtgtccaatacctacctggcctggtatcaccagaggcccggacaggctccccggctgctgatctatggcgcttctagcagagccaccggcatccccgatagattcagcggctctggcagcggcaccgacttcgccctgacaatcagctccctggaacccgaggacttcgccgtgtactactgccagcagtacagcaactcctggaccttcggccagggcaccaaggtggaaatcaagagaggcggaggcggaagtggaggcggaggatctggcggcggaggctctcaggtgcaactggtggaatctggcgggggagtggtgcagcctggcagaagcctgagactgtcttgtgccgccagcggcttcaccttcagcagctacgacatgcactgggtgcgccaggcccctggcaaaggactggaatgggtggccgtgatctcctacgacggcaccaacgagtattacgccgacagcgtgaagggccggttcaccatctccagagacaccagcaagaacaccctgtacctccagatgaacagcctgcgggccgaggacacagccgtgtattattgcgccagagagcggtacttcgactggtccttcgactactggggccagggaaccctggtgtccgtgtctagtacgcgtgagcagaaactgatctcggaagaggatctggcgaagcccaccacgacgccagcgccgcgaccaccaacaccggcgcccaccatcgcgtcgcagcccctgtccctgcgcccagaggcgtgccggccagcggcggggggcgcagtgcacacgagggggctggacttcgcctgtgacatctacatctgggcgcccttggccgggacttgtggggtccttctcctgtcactggttatcaccctttactgcaaacggggcagaaagaaactcctgtatatattcaaacaaccatttatgagaccagtacaaactactcaagaggaagatggctgtagctgccgatttccagaagaagaagaaggaggatgtgaactgagagtgaagttcagcaggagcgcagacgcccccgcgtaccagcagggccagaaccagctctataacgagctgaatctaggacgaagagaggagtacgatgttttggacaagagacgtggccgggaccctgagatggggggaaagccgagaaggaagaaccctcaggaaggcctgtacaatgaactgcagaaagataagatggcggaggcctacagtgagattgggatgaaaggcgagcgccggaggggcaaggggcacgatggcctttaccagggtctcagtacagccaccaaggacacctacgacgcccttcacatgcaggccctgccccctcgctctagtggctccggcgagggcagaggaagtctactaacctgcggagatgtggaagaaaatcctggcccacatatgaccgagtacaagcccacggtgcgcctcgccacccgcgacgacgtccccagggccgtacgcaccctcgccgccgcgttcgccgactaccccgccacgcgccacaccgtcgatccggaccgccacatcgagcgggtcaccgagctgcaagaactcttcctcacgcgcgtcgggctcgacatcggcaaggtgtgggtcgcggacgacggcgccgcggtggcggtctggaccacgccggagagcgtcgaagcgggggcggtgttcgccgagatcggcccgcgcatggccgagttgagcggttcccggctggccgcgcagcaacagatggaaggcctcctggcgccgcaccggcccaaggagcccgcgtggttcctggccaccgtcggcgtctcgcccgaccaccagggcaagggtctgggcagcgccgtcgtgctccccggagtggaggcggccgagcgcgccggggtgcccgccttcctggagacctccgcgccccgcaacctccccttctacgagcggctcggcttcaccgtcaccgccgacgtcgaggtgcccgaaggaccgcgcacctggtgcatgacccgcaagcccggtgcctga

SEQ ID NO: 1721 - DNA, 2172 bp, Artificial Sequence
  Synthetic Polynucleotides
atggccttaccagtgaccgccttgctcctgccgctggccttgctgctccacgccgccaggccggagctgacacaggaccctgctgtgtctgttgccctgggccagacagtgcggattacctgtcaaggcgacagcctgagaagcaactacgccaactggtatcagcagaagcccggacaggctcccgtgctggttatctacggccagaacaacagacccagcggcatccccgatagattcagcggctctagctctggcaataccgccagcctgacaatcactggcgctcaggctgccgatgaggccgactactactgcgatagcagagtgtccaccggcaatcacgtggtgtttggcggcggaacaaagctgacagtgctcggacaaggcggaggcggaagtggaggcggaggatctggcggcggaggctctgaagttcagctggtgcagagcggagccgaagtgaagaaacctggggcctctgtgaaggtgtcctgcaaggcttccggctacacctttaccagctacgccatgcactgggtccgacaggcacctggacaacggcttgaatggatgggctggatcaacgccggcaacggcaacaccaagtacagccagaaattccagggccgcgtgaccatcaccagagatacaagcgccagcaccgcctacatggaactgtctagcctgagatccgaggacaccgccgtgtactactgtgccagagacatcagctacggcagcttcgactattggggccagggcacactggtcaccgttagctctacgcgtgagcagaaactgatctcggaagaggatctggcgaagcccaccacgacgccagcgccgcgaccaccaacaccggcgcccaccatcgcgtcgcagcccctgtccctgcgcccagaggcgtgccggccagcggcggggggcgcagtgcacacgagggggctggacttcgcctgtgacatctacatctgggcgcccttggccgggacttgtggggtccttctcctgtcactggttatcaccctttactgcaaacggggcagaaagaaactcctgtatatattcaaacaaccatttatgagaccagtacaaactactcaagaggaagatggctgtagctgccgatttccagaagaagaagaaggaggatgtgaactgagagtgaagttcagcaggagcgcagacgcccccgcgtaccagcagggccagaaccagctctataacgagctgaatctaggacgaagagaggagtacgatgttttggacaagagacgtggccgggaccctgagatggggggaaagccgagaaggaagaaccctcaggaaggcctgtacaatgaactgcagaaagataagatggcggaggcctacagtgagattgggatgaaaggcgagcgccggaggggcaaggggcacgatggcctttaccagggtctcagtacagccaccaaggacacctacgacgcccttcacatgcaggccctgccccctcgctctagtggctccggcgagggcagaggaagtctactaacctgcggagatgtggaagaaaatcctggcccacatatgaccgagtacaagcccacggtgcgcctcgccacccgcgacgacgtccccagggccgtacgcaccctcgccgccgcgttcgccgactaccccgccacgcgccacaccgtcgatccggaccgccacatcgagcgggtcaccgagctgcaagaactcttcctcacgcgcgtcgggctcgacatcggcaaggtgtgggtcgcggacgacggcgccgcggtggcggtctggaccacgccggagagcgtcgaagcgggggcggtgttcgccgagatcggcccgcgcatggccgagttgagcggttcccggctggccgcgcagcaacagatggaaggcctcctggcgccgcaccggcccaaggagcccgcgtggttcctggccaccgtcggcgtctcgcccgaccaccagggcaagggtctgggcagcgccgtcgtgctccccggagtggaggcggccgagcgcgccggggtgcccgccttcctggagacctccgcgccccgcaacctccccttctacgagcggctcggcttcaccgtcaccgccgacgtcgaggtgcccgaaggaccgcgcacctggtgcatgacccgcaagcccggtgcctga

SEQ ID NO: 1722 - DNA, 2178 bp, Artificial Sequence
  Synthetic Polynucleotides
atggccttaccagtgaccgccttgctcctgccgctggccttgctgctccacgccgccaggccggacatcgtgctgacacagacaccagccacactgagcgtgacacctggcgattctgtgtccctgagctgtagagccagccagagcatcagcaacaacctgcactggtatcagcagaagtcccacgagagccccagactgctgattaagaacgccagccagtctatcagcggcatccccagcaagtttagcggctctggcagcggcaccgacttcaccctgagaatcaacagcgtggaaaccgaggacttcgggatgtacttctgccagcagagcaatagctggccctacacatttggctccggcaccaagctggaaatcaaaggcggaggcggaagtggaggcggaggatctggcggcggaggctctcaagtgaagctgcaacagagcggacccgagctggttaagccaggcgcttccgtgaagattagctgcaaggccagcggctacagcttcaccggctactacatgcactgggtcaagcagagccacggcaacatcctggactggatcggctacatctacccctacaacggcgtgtccagctacaaccagaagttcaagggcaaagccactctgaccgtggacaagagcagcagcaccgcctacatggaactgagaagcctgaccagcgaggacagcgccgtgtactattgtgccagagagcggggcctgtaccagctcagagcaatggattattggggccagggcaccagcgtgaccgtttcttctacgcgtgagcagaaactgatctcggaagaggatctggcgaagcccaccacgacgccagcgccgcgaccaccaacaccggcgcccaccatcgcgtcgcagcccctgtccctgcgcccagaggcgtgccggccagcggcggggggcgcagtgcacacgagggggctggacttcgcctgtgacatctacatctgggcgcccttggccgggacttgtggggtccttctcctgtcactggttatcaccctttactgcaaacggggcagaaagaaactcctgtatatattcaaacaaccatttatgagaccagtacaaactactcaagaggaagatggctgtagctgccgatttccagaagaagaagaaggaggatgtgaactgagagtgaagttcagcaggagcgcagacgcccccgcgtaccagcagggccagaaccagctctataacgagctgaatctaggacgaagagaggagtacgatgttttggacaagagacgtggccgggaccctgagatggggggaaagccgagaaggaagaaccctcaggaaggcctgtacaatgaactgcagaaagataagatggcggaggcctacagtgagattgggatgaaaggcgagcgccggaggggcaaggggcacgatggcctttaccagggtctcagtacagccaccaaggacacctacgacgcccttcacatgcaggccctgccccctcgctctagtggctccggcgagggcagaggaagtctactaacctgcggagatgtggaagaaaatcctggcccacatatgaccgagtacaagcccacggtgcgcctcgccacccgcgacgacgtccccagggccgtacgcaccctcgccgccgcgttcgccgactaccccgccacgcgccacaccgtcgatccggaccgccacatcgagcgggtcaccgagctgcaagaactcttcctcacgcgcgtcgggctcgacatcggcaaggtgtgggtcgcggacgacggcgccgcggtggcggtctggaccacgccggagagcgtcgaagcgggggcggtgttcgccgagatcggcccgcgcatggccgagttgagcggttcccggctggccgcgcagcaacagatggaaggcctcctggcgccgcaccggcccaaggagcccgcgtggttcctggccaccgtcggcgtctcgcccgaccaccagggcaagggtctgggcagcgccgtcgtgctccccggagtggaggcggccgagcgcgccggggtgcccgccttcctggagacctccgcgccccgcaacctccccttctacgagcggctcggcttcaccgtcaccgccgacgtcgaggtgcccgaaggaccgcgcacctggtgcatgacccgcaagcccggtgcctga

SEQ ID NO: 1723 - DNA, 2151 bp, Artificial Sequence
  Synthetic Polynucleotides
atggccttaccagtgaccgccttgctcctgccgctggccttgctgctccacgccgccaggccggacatcgtgatgacacagacccctgccatcatgagcgcctctccaggccagaaagtgaccatcacatgtagcgccagcagcagcgtgaactacatgcactggtatcagcagaagctgggcagcagccccaagctgtggatctacgataccagcaaactggcccctggcgtgccagccagattttctggttctggcagcggcaccagctacagcctgacaatcagcagcatggaagccgaggatgccgccagctacttctgccatcagtggtctagctacccctacacctttggctccggcaccaagctggaaatcaaaggcggaggcggaagtggaggcggaggatctggcggcggaggctctgaagttcagctccaagagtctggccccgacctggtcaagcctagccaaagcctgagcctgacctgtaccgtgaccggctacagcatcacaagcggctatggatggcactggatcagacagttccccggcaacaaactggaatggatgggctacatccactacagcggcagcaccacctacaatcccagcctgaagtcccggatcagcatcagcagagacaccagcaagaaccagttcttcctgcaactgaacagcgtgaccaccgaggacaccgccacctactattgtgctcggagcctgagatattggggccagggcacaaccctgaccgtgtcatctacgcgtgagcagaaactgatctcggaagaggatctggcgaagcccaccacgacgccagcgccgcgaccaccaacaccggcgcccaccatcgcgtcgcagcccctgtccctgcgcccagaggcgtgccggccagcggcggggggcgcagtgcacacgagggggctggacttcgcctgtgacatctacatctgggcgcccttggccgggacttgtggggtccttctcctgtcactggttatcaccctttactgcaaacggggcagaaagaaactcctgtatatattcaaacaaccatttatgagaccagtacaaactactcaagaggaagatggctgtagctgccgatttccagaagaagaagaaggaggatgtgaactgagagtgaagttcagcaggagcgcagacgcccccgcgtaccagcagggccagaaccagctctataacgagctgaatctaggacgaagagaggagtacgatgttttggacaagagacgtggccgggaccctgagatggggggaaagccgagaaggaagaaccctcaggaaggcctgtacaatgaactgcagaaagataagatggcggaggcctacagtgagattgggatgaaaggcgagcgccggaggggcaaggggcacgatggcctttaccagggtctcagtacagccaccaaggacacctacgacgcccttcacatgcaggccctgccccctcgctctagtggctccggcgagggcagaggaagtctactaacctgcggagatgtggaagaaaatcctggcccacatatgaccgagtacaagcccacggtgcgcctcgccacccgcgacgacgtccccagggccgtacgcaccctcgccgccgcgttcgccgactaccccgccacgcgccacaccgtcgatccggaccgccacatcgagcgggtcaccgagctgcaagaactcttcctcacgcgcgtcgggctcgacatcggcaaggtgtgggtcgcggacgacggcgccgcggtggcggtctggaccacgccggagagcgtcgaagcgggggcggtgttcgccgagatcggcccgcgcatggccgagttgagcggttcccggctggccgcgcagcaacagatggaaggcctcctggcgccgcaccggcccaaggagcccgcgtggttcctggccaccgtcggcgtctcgcccgaccaccagggcaagggtctgggcagcgccgtcgtgctccccggagtggaggcggccgagcgcgccggggtgcccgccttcctggagacctccgcgccccgcaacctccccttctacgagcggctcggcttcaccgtcaccgccgacgtcgaggtgcccgaaggaccgcgcacctggtgcatgacccgcaagcccggtgcctga

SEQ ID NO: 1724 - DNA, 2160 bp, Artificial Sequence
  Synthetic Polynucleotides
atggccttaccagtgaccgccttgctcctgccgctggccttgctgctccacgccgccaggccggacatccagatgacacagagccctagcagcctgtctgccagcgtgggagacagagtgaccatcacctgtagcgccaccagcagcatcagctacatgcactggtatcagcagaagcccggcaaggcccctaaaggctggatctacgataccagcaaactggcccacggcgtgcccagcagattttctggttctggcagcggcaccgacttcaccctgacaatatctagcctccagcctgaggacttcgccacctactactgccaccagagaagaagctaccccttcaccttcggccagggcaccaaggtggaaatcaaaggcggaggcggaagtggaggcggaggatctggcggcggaggctctgaagtgcaactggttcagagcggagccgaagtgaagaaacctggggcctctgtgaaggtgtcctgcaaggcttccggctacacctttaccaatttctggattcactgggtccgacaggctccaggccaaggactggaatggatcggagagatcgaccccagcgacagctacaccaactacaaccagaaattcaaaggccgggtcaccatcaccagagacaccagcacaagcaccgcctacctggaactgagcagcctgagaagcgaggacaccgccgtgtactactgcgccagggaaatcaccaccgtggattattggggccagggaaccctggtcaccgtgtcatctacgcgtgagcagaaactgatctcggaagaggatctggcgaagcccaccacgacgccagcgccgcgaccaccaacaccggcgcccaccatcgcgtcgcagcccctgtccctgcgcccagaggcgtgccggccagcggcggggggcgcagtgcacacgagggggctggacttcgcctgtgacatctacatctgggcgcccttggccgggacttgtggggtccttctcctgtcactggttatcaccctttactgcaaacggggcagaaagaaactcctgtatatattcaaacaaccatttatgagaccagtacaaactactcaagaggaagatggctgtagctgccgatttccagaagaagaagaaggaggatgtgaactgagagtgaagttcagcaggagcgcagacgcccccgcgtaccagcagggccagaaccagctctataacgagctgaatctaggacgaagagaggagtacgatgttttggacaagagacgtggccgggaccctgagatggggggaaagccgagaaggaagaaccctcaggaaggcctgtacaatgaactgcagaaagataagatggcggaggcctacagtgagattgggatgaaaggcgagcgccggaggggcaaggggcacgatggcctttaccagggtctcagtacagccaccaaggacacctacgacgcccttcacatgcaggccctgccccctcgctctagtggctccggcgagggcagaggaagtctactaacctgcggagatgtggaagaaaatcctggcccacatatgaccgagtacaagcccacggtgcgcctcgccacccgcgacgacgtccccagggccgtacgcaccctcgccgccgcgttcgccgactaccccgccacgcgccacaccgtcgatccggaccgccacatcgagcgggtcaccgagctgcaagaactcttcctcacgcgcgtcgggctcgacatcggcaaggtgtgggtcgcggacgacggcgccgcggtggcggtctggaccacgccggagagcgtcgaagcgggggcggtgttcgccgagatcggcccgcgcatggccgagttgagcggttcccggctggccgcgcagcaacagatggaaggcctcctggcgccgcaccggcccaaggagcccgcgtggttcctggccaccgtcggcgtctcgcccgaccaccagggcaagggtctgggcagcgccgtcgtgctccccggagtggaggcggccgagcgcgccggggtgcccgccttcctggagacctccgcgccccgcaacctccccttctacgagcggctcggcttcaccgtcaccgccgacgtcgaggtgcccgaaggaccgcgcacctggtgcatgacccgcaagcccggtgcctga

SEQ ID NO: 1725 - DNA, 2181 bp, Artificial Sequence
  Synthetic Polynucleotides
atggccttaccagtgaccgccttgctcctgccgctggccttgctgctccacgccgccaggccggacatccagatgacacagagccctagcagcctgtctgccagcgtgggagacagagtgaccatcacatgcaaggccagccagggcttcaacaaatacgtggcctggtatcagcagaagcccggcaaggctcctaagctgctgatctactacaccagcacactccagcctggcgtgcccagcagattttctggctctggcagcggcagagactacaccctgacaatatccagcctccagccagaggacttcgccacctactactgtctccagtacggcaacctgctgtacgcctttggacagggcaccaaggtggaaatcaagagaggcggaggcggaagtggaggcggaggatctggcggcggaggctctgaagttcagcttgtgcagagcggagccgaagtgaagaaacctggggcctctgtgaaggtgtcctgcaaagccagcggctacacctttaccagctactggatcggctgggtccgacaggctcctggacaaggactggaatggatcggcgacatctatcccggcggaggctacaccaactacaacgagaagttcaagggccgcgtgacaatcaccagagacacctctacaagcaccgcctacctggaactgagcagcctgagaagcgaggacaccgccgtgtactactgcgccagactggatggcagcagctacagaggcgctatggattcttggggccagggcacactggtcaccgtttcttctacgcgtgagcagaaactgatctcggaagaggatctggcgaagcccaccacgacgccagcgccgcgaccaccaacaccggcgcccaccatcgcgtcgcagcccctgtccctgcgcccagaggcgtgccggccagcggcggggggcgcagtgcacacgagggggctggacttcgcctgtgacatctacatctgggcgcccttggccgggacttgtggggtccttctcctgtcactggttatcaccctttactgcaaacggggcagaaagaaactcctgtatatattcaaacaaccatttatgagaccagtacaaactactcaagaggaagatggctgtagctgccgatttccagaagaagaagaaggaggatgtgaactgagagtgaagttcagcaggagcgcagacgcccccgcgtaccagcagggccagaaccagctctataacgagctgaatctaggacgaagagaggagtacgatgttttggacaagagacgtggccgggaccctgagatggggggaaagccgagaaggaagaaccctcaggaaggcctgtacaatgaactgcagaaagataagatggcggaggcctacagtgagattgggatgaaaggcgagcgccggaggggcaaggggcacgatggcctttaccagggtctcagtacagccaccaaggacacctacgacgcccttcacatgcaggccctgccccctcgctctagtggctccggcgagggcagaggaagtctactaacctgcggagatgtggaagaaaatcctggcccacatatgaccgagtacaagcccacggtgcgcctcgccacccgcgacgacgtccccagggccgtacgcaccctcgccgccgcgttcgccgactaccccgccacgcgccacaccgtcgatccggaccgccacatcgagcgggtcaccgagctgcaagaactcttcctcacgcgcgtcgggctcgacatcggcaaggtgtgggtcgcggacgacggcgccgcggtggcggtctggaccacgccggagagcgtcgaagcgggggcggtgttcgccgagatcggcccgcgcatggccgagttgagcggttcccggctggccgcgcagcaacagatggaaggcctcctggcgccgcaccggcccaaggagcccgcgtggttcctggccaccgtcggcgtctcgcccgaccaccagggcaagggtctgggcagcgccgtcgtgctccccggagtggaggcggccgagcgcgccggggtgcccgccttcctggagacctccgcgccccgcaacctccccttctacgagcggctcggcttcaccgtcaccgccgacgtcgaggtgcccgaaggaccgcgcacctggtgcatgacccgcaagcccggtgcctga

SEQ ID NO: 1726 - DNA, 2193 bp, Artificial Sequence
  Synthetic Polynucleotides
atggccttaccagtgaccgccttgctcctgccgctggccttgctgctccacgccgccaggccggacatccagctcacacagagcccttctagcctgtctgccagcgtgggcgacagagtgaccatcacatgtagagccagccagagcgtggactacgacggcgacagctacatgaactggtatcagcagaagcccggcaaggcccctaagctgctgatctacgccgccagctatctggaaagcggcgtgccaagcagattttccggctctggcagcggcaccgatttcaccctgacaatatccagcctccagcctgaggacttcgccacctactactgccagcagagccatgaggacccctacacctttggacagggcaccaaggtggaaatcaagagaggcggaggcggaagtggaggcggaggatctggcggcggaggctctgaagtgcaactggttgaatctggcggcggactggttcagcctggcggatctctgagactgagctgtgccgtgtctggctacagcatcaccagcggctactcttggaactggatcagacaggcccctggcaaaggactggaatgggtcgcctccatcacctacgatggcagcaccaactacaaccccagcgtgaagggcagaatcaccatcagcagggacgacagcaagaacaccttctacctgcaaatgaacagcctgagagccgaggacaccgccgtgtactattgtgccagaggcagccactacttcggccactggcattttgctgtgtggggccagggaaccctggtcacagtttcttctacgcgtgagcagaaactgatctcggaagaggatctggcgaagcccaccacgacgccagcgccgcgaccaccaacaccggcgcccaccatcgcgtcgcagcccctgtccctgcgcccagaggcgtgccggccagcggcggggggcgcagtgcacacgagggggctggacttcgcctgtgacatctacatctgggcgcccttggccgggacttgtggggtccttctcctgtcactggttatcaccctttactgcaaacggggcagaaagaaactcctgtatatattcaaacaaccatttatgagaccagtacaaactactcaagaggaagatggctgtagctgccgatttccagaagaagaagaaggaggatgtgaactgagagtgaagttcagcaggagcgcagacgcccccgcgtaccagcagggccagaaccagctctataacgagctgaatctaggacgaagagaggagtacgatgttttggacaagagacgtggccgggaccctgagatggggggaaagccgagaaggaagaaccctcaggaaggcctgtacaatgaactgcagaaagataagatggcggaggcctacagtgagattgggatgaaaggcgagcgccggaggggcaaggggcacgatggcctttaccagggtctcagtacagccaccaaggacacctacgacgcccttcacatgcaggccctgccccctcgctctagtggctccggcgagggcagaggaagtctactaacctgcggagatgtggaagaaaatcctggcccacatatgaccgagtacaagcccacggtgcgcctcgccacccgcgacgacgtccccagggccgtacgcaccctcgccgccgcgttcgccgactaccccgccacgcgccacaccgtcgatccggaccgccacatcgagcgggtcaccgagctgcaagaactcttcctcacgcgcgtcgggctcgacatcggcaaggtgtgggtcgcggacgacggcgccgcggtggcggtctggaccacgccggagagcgtcgaagcgggggcggtgttcgccgagatcggcccgcgcatggccgagttgagcggttcccggctggccgcgcagcaacagatggaaggcctcctggcgccgcaccggcccaaggagcccgcgtggttcctggccaccgtcggcgtctcgcccgaccaccagggcaagggtctgggcagcgccgtcgtgctccccggagtggaggcggccgagcgcgccggggtgcccgccttcctggagacctccgcgccccgcaacctccccttctacgagcggctcggcttcaccgtcaccgccgacgtcgaggtgcccgaaggaccgcgcacctggtgcatgacccgcaagcccggtgcctga

SEQ ID NO: 1727 - DNA, 2169 bp, Artificial Sequence
  Synthetic Polynucleotides
atggccttaccagtgaccgccttgctcctgccgctggccttgctgctccacgccgccaggccggacatccagatgacacagagccctagcagcctgtctgccagcgtgggagacagagtgaccatcacctgtagagccagccaggacatccggtactacctgaactggtatcagcagaagcccggcaaggcccctaagctgctgatctatgtggcctccagcctccagagcggagtgccttctagattttctggcagcggctccggcaccgagtttaccctgacagtgtctagcttgcagcccgaggacttcgccacctactactgcctgcaagtgtacagcacccctcggacctttggacagggcaccaaggtggaaatcaaaggcggaggcggaagtggaggcggaggatctggcggcggaggctctgaagtgcagcttgttgaatctggcggcggactggctaagcctggcggatctctgagactgtcttgtgccgccagcggcttccggttcaccttcaacaactactacatggactgggtccgacaggcccctggacaaggacttgaatgggtgtccagaatcagcagcagcggcgaccctacttggtacgccgattctgtgaagggcagattcaccatcagcagagagaacgccaagaacaccctgttcctccagatgaactccctgagagccgaggacaccgccgtgtactattgtgcctctctgaccaccggcagcgattcttggggacagggcgtgctggttaccgtgtcatctacgcgtgagcagaaactgatctcggaagaggatctggcgaagcccaccacgacgccagcgccgcgaccaccaacaccggcgcccaccatcgcgtcgcagcccctgtccctgcgcccagaggcgtgccggccagcggcggggggcgcagtgcacacgagggggctggacttcgcctgtgacatctacatctgggcgcccttggccgggacttgtggggtccttctcctgtcactggttatcaccctttactgcaaacggggcagaaagaaactcctgtatatattcaaacaaccatttatgagaccagtacaaactactcaagaggaagatggctgtagctgccgatttccagaagaagaagaaggaggatgtgaactgagagtgaagttcagcaggagcgcagacgcccccgcgtaccagcagggccagaaccagctctataacgagctgaatctaggacgaagagaggagtacgatgttttggacaagagacgtggccgggaccctgagatggggggaaagccgagaaggaagaaccctcaggaaggcctgtacaatgaactgcagaaagataagatggcggaggcctacagtgagattgggatgaaaggcgagcgccggaggggcaaggggcacgatggcctttaccagggtctcagtacagccaccaaggacacctacgacgcccttcacatgcaggccctgccccctcgctctagtggctccggcgagggcagaggaagtctactaacctgcggagatgtggaagaaaatcctggcccacatatgaccgagtacaagcccacggtgcgcctcgccacccgcgacgacgtccccagggccgtacgcaccctcgccgccgcgttcgccgactaccccgccacgcgccacaccgtcgatccggaccgccacatcgagcgggtcaccgagctgcaagaactcttcctcacgcgcgtcgggctcgacatcggcaaggtgtgggtcgcggacgacggcgccgcggtggcggtctggaccacgccggagagcgtcgaagcgggggcggtgttcgccgagatcggcccgcgcatggccgagttgagcggttcccggctggccgcgcagcaacagatggaaggcctcctggcgccgcaccggcccaaggagcccgcgtggttcctggccaccgtcggcgtctcgcccgaccaccagggcaagggtctgggcagcgccgtcgtgctccccggagtggaggcggccgagcgcgccggggtgcccgccttcctggagacctccgcgccccgcaacctccccttctacgagcggctcggcttcaccgtcaccgccgacgtcgaggtgcccgaaggaccgcgcacctggtgcatgacccgcaagcccggtgcctga

SEQ ID NO: 1728 - DNA, 2172 bp, Artificial Sequence
  Synthetic Polynucleotides
atggccttaccagtgaccgccttgctcctgccgctggccttgctgctccacgccgccaggccggagatcgtgatgacacagagccccgccacactgagtgtgtctccaggcgaaagagccacactgtcctgtagagccagccagagcgtgtccagaaacctggcctggtatcagcagaagcctggacaggctccccggctgttgatctacggcgcttctacaagagccaccggcattcccgccagattttctggctctggcagcggcaccgagttcaccctgacaatcggaagcctccagagcgaggacttcgccgtgtactactgccagcagtacaagacctggcctcggacctttggacagggcaccaacgtggaaatcaaaggcggaggcggaagtggaggcggaggatctggcggcggaggctctcaagttcagctgcaacaatggggagccggcctgctgaagcctagcgaaacactgtctctgacctgcgccgtgttcggcggctctttcagcggctactactggtcctggatcagacagcctcctggcaaaggactggaatggatcggcgagatcaaccaccggggcaacaccaacgacaaccccagcctgaaaagcagagtgaccatcagcgtggacaccagcaagaaccagttcgccctgaagctgagcagcgtgacagccgctgataccgccgtgtattattgcgccagagagcggggctacacctacggcaatttcgatcactggggccagggcaccctggtcacagtttcttctacgcgtgagcagaaactgatctcggaagaggatctggcgaagcccaccacgacgccagcgccgcgaccaccaacaccggcgcccaccatcgcgtcgcagcccctgtccctgcgcccagaggcgtgccggccagcggcggggggcgcagtgcacacgagggggctggacttcgcctgtgacatctacatctgggcgcccttggccgggacttgtggggtccttctcctgtcactggttatcaccctttactgcaaacggggcagaaagaaactcctgtatatattcaaacaaccatttatgagaccagtacaaactactcaagaggaagatggctgtagctgccgatttccagaagaagaagaaggaggatgtgaactgagagtgaagttcagcaggagcgcagacgcccccgcgtaccagcagggccagaaccagctctataacgagctgaatctaggacgaagagaggagtacgatgttttggacaagagacgtggccgggaccctgagatggggggaaagccgagaaggaagaaccctcaggaaggcctgtacaatgaactgcagaaagataagatggcggaggcctacagtgagattgggatgaaaggcgagcgccggaggggcaaggggcacgatggcctttaccagggtctcagtacagccaccaaggacacctacgacgcccttcacatgcaggccctgccccctcgctctagtggctccggcgagggcagaggaagtctactaacctgcggagatgtggaagaaaatcctggcccacatatgaccgagtacaagcccacggtgcgcctcgccacccgcgacgacgtccccagggccgtacgcaccctcgccgccgcgttcgccgactaccccgccacgcgccacaccgtcgatccggaccgccacatcgagcgggtcaccgagctgcaagaactcttcctcacgcgcgtcgggctcgacatcggcaaggtgtgggtcgcggacgacggcgccgcggtggcggtctggaccacgccggagagcgtcgaagcgggggcggtgttcgccgagatcggcccgcgcatggccgagttgagcggttcccggctggccgcgcagcaacagatggaaggcctcctggcgccgcaccggcccaaggagcccgcgtggttcctggccaccgtcggcgtctcgcccgaccaccagggcaagggtctgggcagcgccgtcgtgctccccggagtggaggcggccgagcgcgccggggtgcccgccttcctggagacctccgcgccccgcaacctccccttctacgagcggctcggcttcaccgtcaccgccgacgtcgaggtgcccgaaggaccgcgcacctggtgcatgacccgcaagcccggtgcctga

SEQ ID NO: 1729 - DNA, 2175 bp, Artificial Sequence
  Synthetic Polynucleotides
atggccttaccagtgaccgccttgctcctgccgctggccttgctgctccacgccgccaggccggagatcgtgatgacccctagcagcgccacactgagtgtgtctccaggcgaaagagccacactgtcctgtagagccagccagagcgtgtccagaaacctggcctggtatcagcagaagcctggacaggctccccggctgttgatctacggcgcttctacaagagccaccggcattcccgccagattttctggctctggcagcggcaccgagttcaccctgacaatctctagcctccagagcgaggacttcgccgtgtactactgccaccagtacagcaactggatgtgcagcttcggccagggcaccaagctggaaatcaaaggcggaggcggaagtggaggcggaggatctggcggcggaggctctgaagttcagctccttgagtcaggtggcggcctggttcaacctggcggatctctgagactgagctgtgccgccagcggcttcacctttagcagatacgccatgaactgggtccgacaggcccctggcaaaggactggaatgggtgtccggcatctctggaagcggcggcagaacctactacgccgattctgtgaagggcagattcaccatcagccgggacaacagcaagaacaccctgtacctccagatgaacagcctgagagccgaggacacagccgtgtattattgcgccaaggaccgggacttttggagcggcccttttgactattggggccagggaaccctggtcaccgttagctctacgcgtgagcagaaactgatctcggaagaggatctggcgaagcccaccacgacgccagcgccgcgaccaccaacaccggcgcccaccatcgcgtcgcagcccctgtccctgcgcccagaggcgtgccggccagcggcggggggcgcagtgcacacgagggggctggacttcgcctgtgacatctacatctgggcgcccttggccgggacttgtggggtccttctcctgtcactggttatcaccctttactgcaaacggggcagaaagaaactcctgtatatattcaaacaaccatttatgagaccagtacaaactactcaagaggaagatggctgtagctgccgatttccagaagaagaagaaggaggatgtgaactgagagtgaagttcagcaggagcgcagacgcccccgcgtaccagcagggccagaaccagctctataacgagctgaatctaggacgaagagaggagtacgatgttttggacaagagacgtggccgggaccctgagatggggggaaagccgagaaggaagaaccctcaggaaggcctgtacaatgaactgcagaaagataagatggcggaggcctacagtgagattgggatgaaaggcgagcgccggaggggcaaggggcacgatggcctttaccagggtctcagtacagccaccaaggacacctacgacgcccttcacatgcaggccctgccccctcgctctagtggctccggcgagggcagaggaagtctactaacctgcggagatgtggaagaaaatcctggcccacatatgaccgagtacaagcccacggtgcgcctcgccacccgcgacgacgtccccagggccgtacgcaccctcgccgccgcgttcgccgactaccccgccacgcgccacaccgtcgatccggaccgccacatcgagcgggtcaccgagctgcaagaactcttcctcacgcgcgtcgggctcgacatcggcaaggtgtgggtcgcggacgacggcgccgcggtggcggtctggaccacgccggagagcgtcgaagcgggggcggtgttcgccgagatcggcccgcgcatggccgagttgagcggttcccggctggccgcgcagcaacagatggaaggcctcctggcgccgcaccggcccaaggagcccgcgtggttcctggccaccgtcggcgtctcgcccgaccaccagggcaagggtctgggcagcgccgtcgtgctccccggagtggaggcggccgagcgcgccggggtgcccgccttcctggagacctccgcgccccgcaacctccccttctacgagcggctcggcttcaccgtcaccgccgacgtcgaggtgcccgaaggaccgcgcacctggtgcatgacccgcaagcccggtgcctga

SEQ ID NO: 1730 - DNA, 2190 bp, Artificial Sequence
  Synthetic Polynucleotides
atggccttaccagtgaccgccttgctcctgccgctggccttgctgctccacgccgccaggccggacatccagatgacccagagccccagcagcctgtctgccagcgtgggcgacagagtgaccatcacatgcaaggccagcaagaacatcagaagctacctggcctggtatcagcagaagcccggcaaggcccccaagctgctgatctacagcggcagcacactgcacagcggcgtgcccagcagattttccggctctggcagcggcaccgacttcaccctgaccatctctagcctccagcccgaggacttcgccacctactactgccagcagcaccacgagtaccccctgacattcggccagggcaccaaggtggaaatcaagagaggcggaggcggaagtggaggcggaggatctggcggcggaggctctcaggtgcaactccaggaatctggccccggactcgtgaagcccagcgagacactgagcctgacctgtaccgtgtccggctacaccatcaccagcggctacgactggtcctggatcagacagcctcctggcaagggcctggaatggatcggctacatcaactacggcggctccaccaactacaagcccagcctgggaagccgcgtgacaatcagcgtggacacctccaagaaccagttcagcctgaagctgagcagcgtgacagccgccgataccgccgtgtactactgcgcccggtacaacgagtacaagagctacatctacgattggtacttcgacttctggggccagggaaccctcgtgaccgtgtctagtacgcgtgagcagaaactgatctcggaagaggatctggcgaagcccaccacgacgccagcgccgcgaccaccaacaccggcgcccaccatcgcgtcgcagcccctgtccctgcgcccagaggcgtgccggccagcggcggggggcgcagtgcacacgagggggctggacttcgcctgtgacatctacatctgggcgcccttggccgggacttgtggggtccttctcctgtcactggttatcaccctttactgcaaacggggcagaaagaaactcctgtatatattcaaacaaccatttatgagaccagtacaaactactcaagaggaagatggctgtagctgccgatttccagaagaagaagaaggaggatgtgaactgagagtgaagttcagcaggagcgcagacgcccccgcgtaccagcagggccagaaccagctctataacgagctgaatctaggacgaagagaggagtacgatgttttggacaagagacgtggccgggaccctgagatggggggaaagccgagaaggaagaaccctcaggaaggcctgtacaatgaactgcagaaagataagatggcggaggcctacagtgagattgggatgaaaggcgagcgccggaggggcaaggggcacgatggcctttaccagggtctcagtacagccaccaaggacacctacgacgcccttcacatgcaggccctgccccctcgctctagtggctccggcgagggcagaggaagtctactaacctgcggagatgtggaagaaaatcctggcccacatatgaccgagtacaagcccacggtgcgcctcgccacccgcgacgacgtccccagggccgtacgcaccctcgccgccgcgttcgccgactaccccgccacgcgccacaccgtcgatccggaccgccacatcgagcgggtcaccgagctgcaagaactcttcctcacgcgcgtcgggctcgacatcggcaaggtgtgggtcgcggacgacggcgccgcggtggcggtctggaccacgccggagagcgtcgaagcgggggcggtgttcgccgagatcggcccgcgcatggccgagttgagcggttcccggctggccgcgcagcaacagatggaaggcctcctggcgccgcaccggcccaaggagcccgcgtggttcctggccaccgtcggcgtctcgcccgaccaccagggcaagggtctgggcagcgccgtcgtgctccccggagtggaggcggccgagcgcgccggggtgcccgccttcctggagacctccgcgccccgcaacctccccttctacgagcggctcggcttcaccgtcaccgccgacgtcgaggtgcccgaaggaccgcgcacctggtgcatgacccgcaagcccggtgcctga

SEQ ID NO: 1731 - DNA, 2154 bp, Artificial Sequence
  Synthetic Polynucleotides
atggccttaccagtgaccgccttgctcctgccgctggccttgctgctccacgccgccaggccggacgacatccagatgacccagagcagcagcagcttcagcgtgagcctgggcgacagagtgaccatcacctgcatggccagcgaggacatctacatcagactggcctggtaccagcagaagcccggcaacgcccccagactgctgatcagcgccgccaccagcctggagaccggcgtgcccagcagattcagcggcagcggcagcggcaaggactacaccctgagcatcaccagcctgcagaccgaggacgtgggcacctactactgccagcagtactggagcagcccctggaccttcggcggcggcaccaagctggagatcaacggcggaggcggaagtggaggcggaggatctggcggcggaggctctgacgtgcagctgcaggagagcggccccggcctggtgaagcccagccagagcctgagcctgacctgcaccgtgaccggctacagcatcaccagcgactacacctggaactggatcagacagttccccggcaacaagctggagtggatgggctacatcacctacagcggcagcaccagctacaaccccagcctgaagagcagaaacagcatcaccagagacaccagcaagaaccagttcttcctgcagctgaacagcgtgaccaccgaggacaccgccacctactactgcgccagactgggcagaagatacacaatggactactggggccagggcaccagcgtgaccgtgagcagcacgcgtgagcagaaactgatctcggaagaggatctgaaaattgaagttatgtatcctcctccttacctagacaatgagaagagcaatggaaccattatccatgtgaaagggaaacacctttgtccaagtcccctatttcccggaccttctaagcccttttgggtgctggtggtggttgggggagtcctggcttgctatagcttgctagtaacagtggcctttattattttctgggtgaggagtaagaggagcaggctcctgcacagtgactacatgaacatgactccacgccgccccggacccacccgcaagcattaccagccctatgccccaccacgcgacttcgcagcctatcgctccagagtgaagttcagcaggagcgcagacgcccccgcgtaccagcagggccagaaccagctctataacgagctcaatctaggacgaagagaggagtacgatgttttggacaagagacgtggccgggaccctgagatggggggaaagccgagaaggaagaaccctcaggaaggcctgtacaatgaactgcagaaagataagatggcggaggcctacagtgagattgggatgaaaggcgagcgccggaggggcaaggggcacgatggcctttaccagggtctcagtacagccaccaaggacacctacgacgcccttcacatgcaggccctgccccctcgctctagtggctccggcgagggcagaggaagtctactaacctgcggagatgtggaagaaaatcctggcccacatatgaccgagtacaagcccacggtgcgcctcgccacccgcgacgacgtccccagggccgtacgcaccctcgccgccgcgttcgccgactaccccgccacgcgccacaccgtcgatccggaccgccacatcgagcgggtcaccgagctgcaagaactcttcctcacgcgcgtcgggctcgacatcggcaaggtgtgggtcgcggacgacggcgccgcggtggcggtctggaccacgccggagagcgtcgaagcgggggcggtgttcgccgagatcggcccgcgcatggccgagttgagcggttcccggctggccgcgcagcaacagatggaaggcctcctggcgccgcaccggcccaaggagcccgcgtggttcctggccaccgtcggcgtctcgcccgaccaccagggcaagggtctgggcagcgccgtcgtgctccccggagtggaggcggccgagcgcgccggggtgcccgccttcctggagacctccgcgccccgcaacctccccttctacgagcggctcggcttcaccgtcaccgccgacgtcgaggtgcccgaaggaccgcgcacctggtgcatgacccgcaagcccggtgcctga

SEQ ID NO: 1732 - DNA, 2289 bp, Artificial Sequence
  Synthetic Polynucleotides
atggccttaccagtgaccgccttgctcctgccgctggccttgctgctccacgccgccaggccggacgacatccagatgacccagagcagcagcagcttcagcgtgagcctgggcgacagagtgaccatcacctgcatggccagcgaggacatctacatcagactggcctggtaccagcagaagcccggcaacgcccccagactgctgatcagcgccgccaccagcctggagaccggcgtgcccagcagattcagcggcagcggcagcggcaaggactacaccctgagcatcaccagcctgcagaccgaggacgtgggcacctactactgccagcagtactggagcagcccctggaccttcggcggcggcaccaagctggagatcaacggcggaggcggaagtggaggcggaggatctggcggcggaggctctgacgtgcagctgcaggagagcggccccggcctggtgaagcccagccagagcctgagcctgacctgcaccgtgaccggctacagcatcaccagcgactacacctggaactggatcagacagttccccggcaacaagctggagtggatgggctacatcacctacagcggcagcaccagctacaaccccagcctgaagagcagaaacagcatcaccagagacaccagcaagaaccagttcttcctgcagctgaacagcgtgaccaccgaggacaccgccacctactactgcgccagactgggcagaagatacacaatggactactggggccagggcaccagcgtgaccgtgagcagcacgcgtgagcagaaactgatctcggaagaggatctggcgaagcccaccacgacgccagcgccgcgaccaccaacaccggcgcccaccatcgcgtcgcagcccctgtccctgcgcccagaggcgtgccggccagcggcggggggcgcagtgcacacgagggggctggacttcgcctgtgacatctacatctgggcgcccttggccgggacttgtggggtccttctcctgtcactggttatcaccctttactgcaaacggggcagaaagaaactcctgtatatattcaaacaaccatttatgagaccagtacaaactactcaagaggaagatggctgtagctgccgatttccagaagaagaagaaggaggatgtgaactgagagtgaagttcagcaggagcgcagacgcccccgcgtaccagcagggccagaaccagctctataacgagctgaatctaggacgaagagaggagtacgatgttttggacaagagacgtggccgggaccctgagatggggggaaagccgagaaggaagaaccctcaggaaggcctgtacaatgaactgcagaaagataagatggcggaggcctacagtgagattgggatgaaaggcgagcgccggaggggcaaggggcacgatggcctttaccagggtctcagtacagccaccaaggacacctacgacgcccttcacatgcaggccctgccccctcgctctagtggctccggcgagggcagaggaagtctactaacctgcggagatgtggaagaaaatcctggcccaatggtgagcaagggcgaggagctgttcaccggggtggtgcccatcctggtcgagctggacggcgacgtaaacggccacaagttcagcgtgtccggcgagggcgagggcgatgccacctacggcaagctgaccctgaagttcatctgcaccaccggcaagctgcccgtgccctggcccaccctcgtgaccaccctgacctacggcgtgcagtgcttcagccgctaccccgaccacatgaagcagcacgacttcttcaagtccgccatgcccgaaggctacgtccaggagcgcaccatcttcttcaaggacgacggcaactacaagacccgcgccgaggtgaagttcgagggcgacaccctggtgaaccgcatcgagctgaagggcatcgacttcaaggaggacggcaacatcctggggcacaagctggagtacaactacaacagccacaacgtctatatcatggccgacaagcagaagaacggcatcaaggtgaacttcaagatccgccacaacatcgaggacggcagcgtgcagctcgccgaccactaccagcagaacacccccatcggcgacggccccgtgctgctgcccgacaaccactacctgagcacccagtccgccctgagcaaagaccccaacgagaagcgcgatcacatggtcctgctggagttcgtgaccgccgccgggatcactctcggcatggacgagctgtacaagtaa

SEQ ID NO: 1733 - DNA, 2157 bp, Artificial Sequence
  Synthetic Polynucleotides
atggccttaccagtgaccgccttgctcctgccgctggccttgctgctccacgccgccaggccggaccagatcgtgctgacccagtcccccgctattatgtccgcatcaccgggcgaaaaagtgacgatctcctgtagcgcttcatctagcgtctcctacatgtattggtatcaacagaaacctgggtctagcccaaagccgtggatctacagaaccagtaaccttgccagtggggtgccagcccgcttcagcggtagtggcagtggaacttcctatagcctcacaataagcaacatggaggctgaagatgccgctgcctattactgccagcagtaccacagttacccaaccacgttcggcgggggaactaagctcgaagtaaaaggcggaggcggaagtggaggcggaggatctggcggcggaggctctgaggtgcagctggtggaatctgggggcggcctggtccaacctaagggatcactcaagctctcttgtgcggccagcggattctctttcaatacctatgctatgaattgggtgagacaggcgcccggaaagggcctcgaatggatagcccatatccggtcaaaatcaaacaatttcgcaacctactatgcggactccgtgaaggaccgattttccatctcccgagatgcctccgagaatattctgttcctgcagatgaataacctcaagacagaggacaccgccatgtactactgtgtgcgccagggcggtgactttcccatggattactgggggcaggggaccagcgtgaccgtgagctctacgcgtgagcagaaactgatctcggaagaggatctgaaaattgaagttatgtatcctcctccttacctagacaatgagaagagcaatggaaccattatccatgtgaaagggaaacacctttgtccaagtcccctatttcccggaccttctaagcccttttgggtgctggtggtggttgggggagtcctggcttgctatagcttgctagtaacagtggcctttattattttctgggtgaggagtaagaggagcaggctcctgcacagtgactacatgaacatgactccacgccgccccggacccacccgcaagcattaccagccctatgccccaccacgcgacttcgcagcctatcgctccagagtgaagttcagcaggagcgcagacgcccccgcgtaccagcagggccagaaccagctctataacgagctcaatctaggacgaagagaggagtacgatgttttggacaagagacgtggccgggaccctgagatggggggaaagccgagaaggaagaaccctcaggaaggcctgtacaatgaactgcagaaagataagatggcggaggcctacagtgagattgggatgaaaggcgagcgccggaggggcaaggggcacgatggcctttaccagggtctcagtacagccaccaaggacacctacgacgcccttcacatgcaggccctgccccctcgctctagtggctccggcgagggcagaggaagtctactaacctgcggagatgtggaagaaaatcctggcccacatatgaccgagtacaagcccacggtgcgcctcgccacccgcgacgacgtccccagggccgtacgcaccctcgccgccgcgttcgccgactaccccgccacgcgccacaccgtcgatccggaccgccacatcgagcgggtcaccgagctgcaagaactcttcctcacgcgcgtcgggctcgacatcggcaaggtgtgggtcgcggacgacggcgccgcggtggcggtctggaccacgccggagagcgtcgaagcgggggcggtgttcgccgagatcggcccgcgcatggccgagttgagcggttcccggctggccgcgcagcaacagatggaaggcctcctggcgccgcaccggcccaaggagcccgcgtggttcctggccaccgtcggcgtctcgcccgaccaccagggcaagggtctgggcagcgccgtcgtgctccccggagtggaggcggccgagcgcgccggggtgcccgccttcctggagacctccgcgccccgcaacctccccttctacgagcggctcggcttcaccgtcaccgccgacgtcgaggtgcccgaaggaccgcgcacctggtgcatgacccgcaagcccggtgcctga

SEQ ID NO: 1734 - DNA, 2157 bp, Artificial Sequence
  Synthetic Polynucleotides
atggccttaccagtgaccgccttgctcctgccgctggccttgctgctccacgccgccaggccggacatcgtaatgacccaggctgccccatccataccagtcactcccggtgaatccgtgtctatatcttgtaggtccgataagagtctgcttcacagcaacggcaatacttatcttttctggtttttgcagcgaccgggacaaagcccacaactgctgatctatagaatgtcaaatcttgcatcaggggtcccagatcgctttagtggatctgggtcaggcacagctttcaccctgagaatctccggagtggaagcagaagacgtaggcgtgtattactgtatgcagcaccttgagtatccttatacctttggaggcggaactaagctcgaaattaaaggcggaggcggaagtggaggcggaggatctggcggcggaggctctcaggttcaactgcagcagtctggacctgaactggtgaagcctggggcctcagtgaagatgtcctgcaaggcttctggctacgcattcagtagttcctggttgaactgggtgaggcagaggcctggaaagggtcttgagtggattggacggatttatcctggagatggagaaaatcactataatgggaaattcaagggcaaggccacactgactgcagacaaatcctccagcacaggctacatgcaactcagcagcctgacgtctgaggactctgcggtctacttctgtgcaagttattatgaagggggttattggggccaagggactctaatcactgtctctgcaacgcgtgagcagaaactgatctcggaagaggatctgaaaattgaagttatgtatcctcctccttacctagacaatgagaagagcaatggaaccattatccatgtgaaagggaaacacctttgtccaagtcccctatttcccggaccttctaagcccttttgggtgctggtggtggttgggggagtcctggcttgctatagcttgctagtaacagtggcctttattattttctgggtgaggagtaagaggagcaggctcctgcacagtgactacatgaacatgactccacgccgccccggacccacccgcaagcattaccagccctatgccccaccacgcgacttcgcagcctatcgctccagagtgaagttcagcaggagcgcagacgcccccgcgtaccagcagggccagaaccagctctataacgagctcaatctaggacgaagagaggagtacgatgttttggacaagagacgtggccgggaccctgagatggggggaaagccgagaaggaagaaccctcaggaaggcctgtacaatgaactgcagaaagataagatggcggaggcctacagtgagattgggatgaaaggcgagcgccggaggggcaaggggcacgatggcctttaccagggtctcagtacagccaccaaggacacctacgacgcccttcacatgcaggccctgccccctcgctctagtggctccggcgagggcagaggaagtctactaacctgcggagatgtggaagaaaatcctggcccacatatgaccgagtacaagcccacggtgcgcctcgccacccgcgacgacgtccccagggccgtacgcaccctcgccgccgcgttcgccgactaccccgccacgcgccacaccgtcgatccggaccgccacatcgagcgggtcaccgagctgcaagaactcttcctcacgcgcgtcgggctcgacatcggcaaggtgtgggtcgcggacgacggcgccgcggtggcggtctggaccacgccggagagcgtcgaagcgggggcggtgttcgccgagatcggcccgcgcatggccgagttgagcggttcccggctggccgcgcagcaacagatggaaggcctcctggcgccgcaccggcccaaggagcccgcgtggttcctggccaccgtcggcgtctcgcccgaccaccagggcaagggtctgggcagcgccgtcgtgctccccggagtggaggcggccgagcgcgccggggtgcccgccttcctggagacctccgcgccccgcaacctccccttctacgagcggctcggcttcaccgtcaccgccgacgtcgaggtgcccgaaggaccgcgcacctggtgcatgacccgcaagcccggtgcctga

SEQ ID NO: 1735 - DNA, 2154 bp, Artificial Sequence
  Synthetic Polynucleotides
atggccttaccagtgaccgccttgctcctgccgctggccttgctgctccacgccgccaggccggacatcgtactgacacagagccccgcttctctggcagtgtcactgggccagtccgttacaatatcctgtcgggcgagtgaatccgtggaatactatggaacaagtctcatgcagtggtatcagcagaaacctggacagccccccaagctgctcatctacggtgcgtcaaatgtcgagagtggggttccggcccgattcagtggttccgggagtggcacagactttagcctcaacatccatcctgttgaggaagacgatattgccatgtatttttgccaacagtcccgcaaagtcccctggacctttggtggaggaactaagctggagatcaagggcggaggcggaagtggaggcggaggatctggcggcggaggctctgaggtcaagctggtagagagtggaggtgggctggttaaaccaggggggagcagaaaactgagttgtgccgcaagtggcttcaccttttctagctataccatgagctgggtaagacaaactccagcaaagcgccttgagtgggtcgcaacaattagcagcggatcttctactatttattacgctgacactgttaagggccggtttaccatatcaagagacaacgccaagaatacccttttccttcaaatgacttcactgcggtccgaggatacggcaatgtactattgtgcacgacggtggtttctcgactgctggggccaggggactacccttaccgtgtctagtacgcgtgagcagaaactgatctcggaagaggatctgaaaattgaagttatgtatcctcctccttacctagacaatgagaagagcaatggaaccattatccatgtgaaagggaaacacctttgtccaagtcccctatttcccggaccttctaagcccttttgggtgctggtggtggttgggggagtcctggcttgctatagcttgctagtaacagtggcctttattattttctgggtgaggagtaagaggagcaggctcctgcacagtgactacatgaacatgactccacgccgccccggacccacccgcaagcattaccagccctatgccccaccacgcgacttcgcagcctatcgctccagagtgaagttcagcaggagcgcagacgcccccgcgtaccagcagggccagaaccagctctataacgagctcaatctaggacgaagagaggagtacgatgttttggacaagagacgtggccgggaccctgagatggggggaaagccgagaaggaagaaccctcaggaaggcctgtacaatgaactgcagaaagataagatggcggaggcctacagtgagattgggatgaaaggcgagcgccggaggggcaaggggcacgatggcctttaccagggtctcagtacagccaccaaggacacctacgacgcccttcacatgcaggccctgccccctcgctctagtggctccggcgagggcagaggaagtctactaacctgcggagatgtggaagaaaatcctggcccacatatgaccgagtacaagcccacggtgcgcctcgccacccgcgacgacgtccccagggccgtacgcaccctcgccgccgcgttcgccgactaccccgccacgcgccacaccgtcgatccggaccgccacatcgagcgggtcaccgagctgcaagaactcttcctcacgcgcgtcgggctcgacatcggcaaggtgtgggtcgcggacgacggcgccgcggtggcggtctggaccacgccggagagcgtcgaagcgggggcggtgttcgccgagatcggcccgcgcatggccgagttgagcggttcccggctggccgcgcagcaacagatggaaggcctcctggcgccgcaccggcccaaggagcccgcgtggttcctggccaccgtcggcgtctcgcccgaccaccagggcaagggtctgggcagcgccgtcgtgctccccggagtggaggcggccgagcgcgccggggtgcccgccttcctggagacctccgcgccccgcaacctccccttctacgagcggctcggcttcaccgtcaccgccgacgtcgaggtgcccgaaggaccgcgcacctggtgcatgacccgcaagcccggtgcctga

SEQ ID NO: 1736 - DNA, 2163 bp, Artificial Sequence
  Synthetic Polynucleotides
atggccttaccagtgaccgccttgctcctgccgctggccttgctgctccacgccgccaggccggaccaggtgcagctgcagcagtcgggcccaggactggtgaagccttcggagaccctgtccctcacctgcactgtctctggtgactccatcagtagttactactggagctggatcaggcagcccccagggaagggactggagtggattgggtatatctattacagtgggagcaccaactacaacccctccctcaagagtcgagtcaccatatcagtagacacgtccaagagccagttctccctgaagctgagctctgtgaccgccgcagacacggccgtgtattactgtgcgcgcggcaggtacttcgatgtctggggacgaggcactatggtgactagcagcggcggaggcggaagtggaggcggaggatctggcggcggaggctcttcctcctacgtgctgactcagcctccctccgtgtctgggtctcctggacagtcgatcaccatctcctgcactggaaccagcagtgacgttggtggttataactatgtctcctggtaccaacaacacccaggcaaagcccccaaactcatgatttatgagggcagtaagcggccctcaggggtttctaatcgcttctctggctccaagtctggcaacacggcctccctgacaatctctgggctccaggctgaggacgaggctgattattactgcagctcatatacaaccaggagcacccgagttttcggcggagggaccaagctgaccgtcctaggtgccgccgcaacgcgtgagcagaaactgatctcggaagaggatctgaaaattgaagttatgtatcctcctccttacctagacaatgagaagagcaatggaaccattatccatgtgaaagggaaacacctttgtccaagtcccctatttcccggaccttctaagcccttttgggtgctggtggtggttgggggagtcctggcttgctatagcttgctagtaacagtggcctttattattttctgggtgaggagtaagaggagcaggctcctgcacagtgactacatgaacatgactccacgccgccccggacccacccgcaagcattaccagccctatgccccaccacgcgacttcgcagcctatcgctccagagtgaagttcagcaggagcgcagacgcccccgcgtaccagcagggccagaaccagctctataacgagctcaatctaggacgaagagaggagtacgatgttttggacaagagacgtggccgggaccctgagatggggggaaagccgagaaggaagaaccctcaggaaggcctgtacaatgaactgcagaaagataagatggcggaggcctacagtgagattgggatgaaaggcgagcgccggaggggcaaggggcacgatggcctttaccagggtctcagtacagccaccaaggacacctacgacgcccttcacatgcaggccctgccccctcgctctagtggctccggcgagggcagaggaagtctactaacctgcggagatgtggaagaaaatcctggcccacatatgaccgagtacaagcccacggtgcgcctcgccacccgcgacgacgtccccagggccgtacgcaccctcgccgccgcgttcgccgactaccccgccacgcgccacaccgtcgatccggaccgccacatcgagcgggtcaccgagctgcaagaactcttcctcacgcgcgtcgggctcgacatcggcaaggtgtgggtcgcggacgacggcgccgcggtggcggtctggaccacgccggagagcgtcgaagcgggggcggtgttcgccgagatcggcccgcgcatggccgagttgagcggttcccggctggccgcgcagcaacagatggaaggcctcctggcgccgcaccggcccaaggagcccgcgtggttcctggccaccgtcggcgtctcgcccgaccaccagggcaagggtctgggcagcgccgtcgtgctccccggagtggaggcggccgagcgcgccggggtgcccgccttcctggagacctccgcgccccgcaacctccccttctacgagcggctcggcttcaccgtcaccgccgacgtcgaggtgcccgaaggaccgcgcacctggtgcatgacccgcaagcccggtgcctga

SEQ ID NO: 1737 - DNA, 2166 bp, Artificial Sequence
  Synthetic Polynucleotides
atggccttaccagtgaccgccttgctcctgccgctggccttgctgctccacgccgccaggccggacatcgtaatgacacagtctcccctgtccctccctgtcacaccaggtgaacctgccagtatttcttgtagatccagtaagtcacttctgcactccaatgggaacacctacctgtattggttccagcaaaagcctggtcaggcacctcgcttgcttatttataggatgtccaatcttgcatccggcgtgccagaccgattctcaggctccggctctggtactgcatttaccctgaaaatctcccgcgtggaagcagaagatgtgggcgtgtactactgtatgcagcacatcgagtaccccttcacgtttggtcaaggcacaaagctggaaatcaaaggcggaggcggaagtggaggcggaggatctggcggcggaggctctcaggtccagctcgtccagtctggacccgaagtcaagaagccaggcgcctctgtgaaggtttcttgtaaggccagcggatatacattcactaattcatggatgaactgggtgaggcagcgccctggcaaggggcttgagtggatcgggcggatttacccaggggatggcgagacaatttacaacgggaaatttcgggtgagagtgacgatcaccgcagacgaatctacaagcacggcctacatggagttgtcctctctcaggagtgaggacaccgccgtctactattgtgctagaggttatgacgactattcattcgcatactggggccagggcaccaccgtcacagtatcatctacgcgtgagcagaaactgatctcggaagaggatctgaaaattgaagttatgtatcctcctccttacctagacaatgagaagagcaatggaaccattatccatgtgaaagggaaacacctttgtccaagtcccctatttcccggaccttctaagcccttttgggtgctggtggtggttgggggagtcctggcttgctatagcttgctagtaacagtggcctttattattttctgggtgaggagtaagaggagcaggctcctgcacagtgactacatgaacatgactccacgccgccccggacccacccgcaagcattaccagccctatgccccaccacgcgacttcgcagcctatcgctccagagtgaagttcagcaggagcgcagacgcccccgcgtaccagcagggccagaaccagctctataacgagctcaatctaggacgaagagaggagtacgatgttttggacaagagacgtggccgggaccctgagatggggggaaagccgagaaggaagaaccctcaggaaggcctgtacaatgaactgcagaaagataagatggcggaggcctacagtgagattgggatgaaaggcgagcgccggaggggcaaggggcacgatggcctttaccagggtctcagtacagccaccaaggacacctacgacgcccttcacatgcaggccctgccccctcgctctagtggctccggcgagggcagaggaagtctactaacctgcggagatgtggaagaaaatcctggcccacatatgaccgagtacaagcccacggtgcgcctcgccacccgcgacgacgtccccagggccgtacgcaccctcgccgccgcgttcgccgactaccccgccacgcgccacaccgtcgatccggaccgccacatcgagcgggtcaccgagctgcaagaactcttcctcacgcgcgtcgggctcgacatcggcaaggtgtgggtcgcggacgacggcgccgcggtggcggtctggaccacgccggagagcgtcgaagcgggggcggtgttcgccgagatcggcccgcgcatggccgagttgagcggttcccggctggccgcgcagcaacagatggaaggcctcctggcgccgcaccggcccaaggagcccgcgtggttcctggccaccgtcggcgtctcgcccgaccaccagggcaagggtctgggcagcgccgtcgtgctccccggagtggaggcggccgagcgcgccggggtgcccgccttcctggagacctccgcgccccgcaacctccccttctacgagcggctcggcttcaccgtcaccgccgacgtcgaggtgcccgaaggaccgcgcacctggtgcatgacccgcaagcccggtgcctga

SEQ ID NO: 1738 - DNA, 1929 bp, Artificial Sequence
  Synthetic Polynucleotides
atggagctgactgaattgctcctcgtggtcatgcttctcctaactgcaaggctaacgctgtccagcccggctcctcctgcttgtgacctccgagtcctcagtaaactgcttcgtgactcccatgtccttcacagcagactgagccagtgcccagaggttcaccctttgcctacacctgtcctgctgcctgctgtggactttagcttgggagaatggaaaacccagatggaggagaccaaggcacaggacattctgggagcagtgacccttctgctggagggagtgatggcagcacggggacaactgggacccacttgcctctcatccctcctggggcagctttctggacaggtccgtctcctccttggggccctgcagagcctccttggaacccagcttcctccacagggcaggaccacagctcacaaggaccctaatgccatcttcctgagcttccaacacctgctccgaggaaaggtgcgtttcctgatgcttgtaggagggtccaccctctgcgtcaggcgggccccacccaccacagctgtccccagcagaacctctacgcgtgagcagaaactgatctcggaagaggatctgaaaattgaagttatgtatcctcctccttacctagacaatgagaagagcaatggaaccattatccatgtgaaagggaaacacctttgtccaagtcccctatttcccggaccttctaagcccttttgggtgctggtggtggttgggggagtcctggcttgctatagcttgctagtaacagtggcctttattattttctgggtgaggagtaagaggagcaggctcctgcacagtgactacatgaacatgactccacgccgccccggacccacccgcaagcattaccagccctatgccccaccacgcgacttcgcagcctatcgctccagagtgaagttcagcaggagcgcagacgcccccgcgtaccagcagggccagaaccagctctataacgagctcaatctaggacgaagagaggagtacgatgttttggacaagagacgtggccgggaccctgagatggggggaaagccgagaaggaagaaccctcaggaaggcctgtacaatgaactgcagaaagataagatggcggaggcctacagtgagattgggatgaaaggcgagcgccggaggggcaaggggcacgatggcctttaccagggtctcagtacagccaccaaggacacctacgacgcccttcacatgcaggccctgccccctcgctctagtggctccggcgagggcagaggaagtctactaacctgcggagatgtggaagaaaatcctggcccacatatgaccgagtacaagcccacggtgcgcctcgccacccgcgacgacgtccccagggccgtacgcaccctcgccgccgcgttcgccgactaccccgccacgcgccacaccgtcgatccggaccgccacatcgagcgggtcaccgagctgcaagaactcttcctcacgcgcgtcgggctcgacatcggcaaggtgtgggtcgcggacgacggcgccgcggtggcggtctggaccacgccggagagcgtcgaagcgggggcggtgttcgccgagatcggcccgcgcatggccgagttgagcggttcccggctggccgcgcagcaacagatggaaggcctcctggcgccgcaccggcccaaggagcccgcgtggttcctggccaccgtcggcgtctcgcccgaccaccagggcaagggtctgggcagcgccgtcgtgctccccggagtggaggcggccgagcgcgccggggtgcccgccttcctggagacctccgcgccccgcaacctccccttctacgagcggctcggcttcaccgtcaccgccgacgtcgaggtgcccgaaggaccgcgcacctggtgcatgacccgcaagcccggtgcctga

SEQ ID NO: 1739 - DNA, 1929 bp, Artificial Sequence
  Synthetic Polynucleotides
atggagctgactgatttgctcctggcggccatgcttcttgcagtggcaagactaactctgtccagccccgtagctcctgcctgtgaccccagactcctaaataaactgctgcgtgactcccacctccttcacagccgactgagtcagtgtcccgacgtggaccctttgtctatccctgttctgctgcctgctgtggactttagcctgggagaatggaaaacccagacggaacagagcaaggcacaggacattctaggggcagtgtcccttctactggagggagtgatggcagcacgaggacagttggaaccctcctgcctctcatccctcctgggacagctttctgggcaggttcgcctcctcttgggggccctgcagggcctcctaggaacccagcttcctctacagggcaggaccacagctcacaaggaccccaatgccctcttcttgagcttgcaacaactgcttcggggaaaggtgcgcttcctgcttctggtagaaggtcccaccctctgtgtcagacggaccctgccaaccacagctgtcccaagcagtacttctacgcgtgagcagaaactgatctcggaagaggatctgaaaattgaagttatgtatcctcctccttacctagacaatgagaagagcaatggaaccattatccatgtgaaagggaaacacctttgtccaagtcccctatttcccggaccttctaagcccttttgggtgctggtggtggttgggggagtcctggcttgctatagcttgctagtaacagtggcctttattattttctgggtgaggagtaagaggagcaggctcctgcacagtgactacatgaacatgactccacgccgccccggacccacccgcaagcattaccagccctatgccccaccacgcgacttcgcagcctatcgctccagagtgaagttcagcaggagcgcagacgcccccgcgtaccagcagggccagaaccagctctataacgagctcaatctaggacgaagagaggagtacgatgttttggacaagagacgtggccgggaccctgagatggggggaaagccgagaaggaagaaccctcaggaaggcctgtacaatgaactgcagaaagataagatggcggaggcctacagtgagattgggatgaaaggcgagcgccggaggggcaaggggcacgatggcctttaccagggtctcagtacagccaccaaggacacctacgacgcccttcacatgcaggccctgccccctcgctctagtggctccggcgagggcagaggaagtctactaacctgcggagatgtggaagaaaatcctggcccacatatgaccgagtacaagcccacggtgcgcctcgccacccgcgacgacgtccccagggccgtacgcaccctcgccgccgcgttcgccgactaccccgccacgcgccacaccgtcgatccggaccgccacatcgagcgggtcaccgagctgcaagaactcttcctcacgcgcgtcgggctcgacatcggcaaggtgtgggtcgcggacgacggcgccgcggtggcggtctggaccacgccggagagcgtcgaagcgggggcggtgttcgccgagatcggcccgcgcatggccgagttgagcggttcccggctggccgcgcagcaacagatggaaggcctcctggcgccgcaccggcccaaggagcccgcgtggttcctggccaccgtcggcgtctcgcccgaccaccagggcaagggtctgggcagcgccgtcgtgctccccggagtggaggcggccgagcgcgccggggtgcccgccttcctggagacctccgcgccccgcaacctccccttctacgagcggctcggcttcaccgtcaccgccgacgtcgaggtgcccgaaggaccgcgcacctggtgcatgacccgcaagcccggtgcctga

SEQ ID NO: 1740 - DNA, 3105 bp, Artificial Sequence
  Synthetic Polynucleotides
atggccttaccagtgaccgccttgctcctgccgctggccttgctgctccacgccgccaggccggacgacatccagatgacccagagcagcagcagcttcagcgtgagcctgggcgacagagtgaccatcacctgcatggccagcgaggacatctacatcagactggcctggtaccagcagaagcccggcaacgcccccagactgctgatcagcgccgccaccagcctggagaccggcgtgcccagcagattcagcggcagcggcagcggcaaggactacaccctgagcatcaccagcctgcagaccgaggacgtgggcacctactactgccagcagtactggagcagcccctggaccttcggcggcggcaccaagctggagatcaacggcggaggcggaagtggaggcggaggatctggcggcggaggctctgacgtgcagctgcaggagagcggccccggcctggtgaagcccagccagagcctgagcctgacctgcaccgtgaccggctacagcatcaccagcgactacacctggaactggatcagacagttccccggcaacaagctggagtggatgggctacatcacctacagcggcagcaccagctacaaccccagcctgaagagcagaaacagcatcaccagagacaccagcaagaaccagttcttcctgcagctgaacagcgtgaccaccgaggacaccgccacctactactgcgccagactgggcagaagatacacaatggactactggggccagggcaccagcgtgaccgtgagcagcacgcgtgagcagaaactgatctcggaagaggatctggcgaagcccaccacgacgccagcgccgcgaccaccaacaccggcgcccaccatcgcgtcgcagcccctgtccctgcgcccagaggcgtgccggccagcggcggggggcgcagtgcacacgagggggctggacttcgcctgtgacatctacatctgggcgcccttggccgggacttgtggggtccttctcctgtcactggttatcaccctttactgcaaacggggcagaaagaaactcctgtatatattcaaacaaccatttatgagaccagtacaaactactcaagaggaagatggctgtagctgccgatttccagaagaagaagaaggaggatgtgaactgagagtgaagttcagcaggagcgcagacgcccccgcgtaccagcagggccagaaccagctctataacgagctgaatctaggacgaagagaggagtacgatgttttggacaagagacgtggccgggaccctgagatggggggaaagccgagaaggaagaaccctcaggaaggcctgtacaatgaactgcagaaagataagatggcggaggcctacagtgagattgggatgaaaggcgagcgccggaggggcaaggggcacgatggcctttaccagggtctcagtacagccaccaaggacacctacgacgcccttcacatgcaggccctgccccctcgctctagaggatctggagcaacaaacttctcactactcaaacaagcaggtgacgtggaggagaatcccgggcctgggatccacatggactggatttggcgcatccttttccttgtcggcgctgctaccggcgcccattccgaggttcagttggtcgaatcaggcgggggcctcgtccaacccggcggaagcctgcggctgtcttgcgcagcaagtggtagtgtgttcaagatcaacgttatggcctggtatcgccaggctccgggaaaagggagagagctggttgcggggatcattagcggtggctccaccagctacgctgacagtgtgaagggaaggttcactatatcacgcgacaacgcaaagaatacattgtacctccagatgaatagcttgcggcccgaagacacggcagtctactattgtgcctttatcacaacagagagcgactatgacctgggccgccggtattgggggcagggaacccttgtgaccgtttcatccggcggaggcggaagtggaggcggaggatctggcggcggaggctctgaggtgcagctcgtggaatcaggcggaggtcttgtacagccaggaaattctcttcggctgtcttgcgccgcgagcgggttcaccttcagcagcttcggaatgagctgggtaagacaggcaccggggaaaggcctggagtgggtgagctcaatcagtgggagcgggtcagataccctgtacgcggattccgtgaagggcagattcacaatctctcgggacaatgctaagacaacactttaccttcagatgaactctctgcgacccgaggataccgctgtctactactgtacaataggaggttctctgtccagaagttctcaagggacactggtgaccgtctccagcctcgagaccgatttctacgactacaaggacgacgatgacaagactagtggctccggcgagggcagaggaagtctactaacctgcggagatgtggaagaaaatcctggcccacatatgaccgagtacaagcccacggtgcgcctcgccacccgcgacgacgtccccagggccgtacgcaccctcgccgccgcgttcgccgactaccccgccacgcgccacaccgtcgatccggaccgccacatcgagcgggtcaccgagctgcaagaactcttcctcacgcgcgtcgggctcgacatcggcaaggtgtgggtcgcggacgacggcgccgcggtggcggtctggaccacgccggagagcgtcgaagcgggggcggtgttcgccgagatcggcccgcgcatggccgagttgagcggttcccggctggccgcgcagcaacagatggaaggcctcctggcgccgcaccggcccaaggagcccgcgtggttcctggccaccgtcggcgtctcgcccgaccaccagggcaagggtctgggcagcgccgtcgtgctccccggagtggaggcggccgagcgcgccggggtgcccgccttcctggagacctccgcgccccgcaacctccccttctacgagcggctcggcttcaccgtcaccgccgacgtcgaggtgcccgaaggaccgcgcacctggtgcatgacccgcaagcccggtgcctga

SEQ ID NO: 1741 - DNA, 3081 bp, Artificial Sequence
  Synthetic Polynucleotides
atggccttaccagtgaccgccttgctcctgccgctggccttgctgctccacgccgccaggccggacgacatccagatgacccagagcagcagcagcttcagcgtgagcctgggcgacagagtgaccatcacctgcatggccagcgaggacatctacatcagactggcctggtaccagcagaagcccggcaacgcccccagactgctgatcagcgccgccaccagcctggagaccggcgtgcccagcagattcagcggcagcggcagcggcaaggactacaccctgagcatcaccagcctgcagaccgaggacgtgggcacctactactgccagcagtactggagcagcccctggaccttcggcggcggcaccaagctggagatcaacggcggaggcggaagtggaggcggaggatctggcggcggaggctctgacgtgcagctgcaggagagcggccccggcctggtgaagcccagccagagcctgagcctgacctgcaccgtgaccggctacagcatcaccagcgactacacctggaactggatcagacagttccccggcaacaagctggagtggatgggctacatcacctacagcggcagcaccagctacaaccccagcctgaagagcagaaacagcatcaccagagacaccagcaagaaccagttcttcctgcagctgaacagcgtgaccaccgaggacaccgccacctactactgcgccagactgggcagaagatacacaatggactactggggccagggcaccagcgtgaccgtgagcagcacgcgtgagcagaaactgatctcggaagaggatctggcgaagcccaccacgacgccagcgccgcgaccaccaacaccggcgcccaccatcgcgtcgcagcccctgtccctgcgcccagaggcgtgccggccagcggcggggggcgcagtgcacacgagggggctggacttcgcctgtgacatctacatctgggcgcccttggccgggacttgtggggtccttctcctgtcactggttatcaccctttactgcgggcgcgccagagtgaagttcagcaggagcgcagacgcccccgcgtaccagcagggccagaaccagctctataacgagctgaatctaggacgaagagaggagtacgatgttttggacaagagacgtggccgggaccctgagatggggggaaagccgagaaggaagaaccctcaggaaggcctgtacaatgaactgcagaaagataagatggcggaggcctacagtgagattgggatgaaaggcgagcgccggaggggcaaggggcacgatggcctttaccagggtctcagtacagccaccaaggacacctacgacgcccttcacatgcaggccctgccccctcgctctagaggatctggagcaacaaacttctcactactcaaacaagcaggtgacgtggaggagaatcccgggcctgggatccacatgactagaggagtgcaggtggagactatctccccaggagacgggcgcaccttccccaagcgcggccagacctgcgtggtgcactacaccgggatgcttgaagatggaaagaaagttgattcctcccgggacagaaacaagccctttaagtttatgctaggcaagcaggaggtgatccgaggctgggaagaaggggttgcccagatgagtgtgggtcagagagccaaactgactatatctccagattatgcctatggtgccactgggcacccaggcatcatcccaccacatgccactctcgtcttcgatgtggagcttctaaaactggaagggatccacatggccacttacgaggttctctgtgaggtggcgcggaaactgggcacggatgacagggaagtggtattgttcctcctaaacgtgttcatacctcaacccacactggcccaattaattggagctcttagagctttaaaggaggagggcaggttaacgtttcccctgttagcggaatgtctgtttcgtgcaggtcgcagagacctcttgcgcgacctgcttcacttagacccgcgttttttagagcgccacctagcgggcacaatgagttatttcagcccttatcagctcactgttctccacgtagacggggagctgtgtgcgagggatattaggtctttgatatttttaagcaaggacactatagggtctcgcagcacaccacagacattcttacactgggtgtactgtatggaaaacttagacctactgggtcccactgacgtggatgccctaatgtcaatgcttagatctttgtcaagagtagacctacagcgccaagtgcaaaccctaatgggccttcacctttccggcccatcacactcccaacactatcgccatacaccactcgagaccgatttctacgactacaaggacgacgatgacaagactagtggctccggcgagggcagaggaagtctactaacctgcggagatgtggaagaaaatcctggcccacatatgaccgagtacaagcccacggtgcgcctcgccacccgcgacgacgtccccagggccgtacgcaccctcgccgccgcgttcgccgactaccccgccacgcgccacaccgtcgatccggaccgccacatcgagcgggtcaccgagctgcaagaactcttcctcacgcgcgtcgggctcgacatcggcaaggtgtgggtcgcggacgacggcgccgcggtggcggtctggaccacgccggagagcgtcgaagcgggggcggtgttcgccgagatcggcccgcgcatggccgagttgagcggttcccggctggccgcgcagcaacagatggaaggcctcctggcgccgcaccggcccaaggagcccgcgtggttcctggccaccgtcggcgtctcgcccgaccaccagggcaagggtctgggcagcgccgtcgtgctccccggagtggaggcggccgagcgcgccggggtgcccgccttcctggagacctccgcgccccgcaacctccccttctacgagcggctcggcttcaccgtcaccgccgacgtcgaggtgcccgaaggaccgcgcacctggtgcatgacccgcaagcccggtgcctga

SEQ ID NO: 1742 - DNA, 3225 bp, Artificial Sequence
  Synthetic Polynucleotides
atggccttaccagtgaccgccttgctcctgccgctggccttgctgctccacgccgccaggccggacgacatccagatgacccagagcagcagcagcttcagcgtgagcctgggcgacagagtgaccatcacctgcatggccagcgaggacatctacatcagactggcctggtaccagcagaagcccggcaacgcccccagactgctgatcagcgccgccaccagcctggagaccggcgtgcccagcagattcagcggcagcggcagcggcaaggactacaccctgagcatcaccagcctgcagaccgaggacgtgggcacctactactgccagcagtactggagcagcccctggaccttcggcggcggcaccaagctggagatcaacggcggaggcggaagtggaggcggaggatctggcggcggaggctctgacgtgcagctgcaggagagcggccccggcctggtgaagcccagccagagcctgagcctgacctgcaccgtgaccggctacagcatcaccagcgactacacctggaactggatcagacagttccccggcaacaagctggagtggatgggctacatcacctacagcggcagcaccagctacaaccccagcctgaagagcagaaacagcatcaccagagacaccagcaagaaccagttcttcctgcagctgaacagcgtgaccaccgaggacaccgccacctactactgcgccagactgggcagaagatacacaatggactactggggccagggcaccagcgtgaccgtgagcagcacgcgtgagcagaaactgatctcggaagaggatctggcgaagcccaccacgacgccagcgccgcgaccaccaacaccggcgcccaccatcgcgtcgcagcccctgtccctgcgcccagaggcgtgccggccagcggcggggggcgcagtgcacacgagggggctggacttcgcctgtgacatctacatctgggcgcccttggccgggacttgtggggtccttctcctgtcactggttatcaccctttactgcgggcgcgccagagtgaagttcagcaggagcgcagacgcccccgcgtaccagcagggccagaaccagctctataacgagctgaatctaggacgaagagaggagtacgatgttttggacaagagacgtggccgggaccctgagatggggggaaagccgagaaggaagaaccctcaggaaggcctgtacaatgaactgcagaaagataagatggcggaggcctacagtgagattgggatgaaaggcgagcgccggaggggcaaggggcacgatggcctttaccagggtctcagtacagccaccaaggacacctacgacgcccttcacatgcaggccctgccccctcgctctagaggatctggagcaacaaacttctcactactcaaacaagcaggtgacgtggaggagaatcccgggcctgggatccgggactacaaggacgacgatgacaaggcgcactttccgggctttggacagtcactcctgtacggctatcccgtctatgtattcggtgattgtgtgcaagccgattggtgtccagtgtccggtggtctgtgcagtacacggcttcaccggcacgccctgctggcaacttgccccgaacaccagcttacatgggacccaatcgacggtcgcgtagtgtcttctcccctccagtatctgattcctagattgccttcctttccaacacagaggaccagccggaccctgaaggttctgaccccaccgactacaccagtgtcccccaaagtgcctcccgccttcttccaaagtatgagaaaacatactccctataggaatggctgcttggagccaaccctcggtgaccaactcccctcactcgccttccccgaacctggcctgcgcccacagaacatctatactacttggggcaagactgtggtatgcctttacctgtaccagctgagtcccccgatgacatggcccctcatcccccacgtcattttctgtcacccacggcagctgggagcgttccttaccaaagttccgctcaaacgcctggaggaactgctgtataagatgtttctgcacactggtgccgtgatcgtgctgcccgaggacgatctgcccaccacaatgttccagccggtgcgggctccttgcatccagactgcttggtgcacaggccttctgccttaccactccatactcacaacccctggtctgatctggaccttcaatgacggaagccctatgatttcaggaccttgtcccaaggctggacagccatctctggttgtgcagtcatctctgctcatcttcgagaaattccaaaccaaggcctttcatccatcctacctcctctcccatcagctgatacagtacagctccttccacaacttgcacctgctctttgatgaatatacgaatattccagtcagcagaagcttcaacaagggcgaggccgatgataatggcgaccagccgcctgagcctgccgcacagggtgaaagctccacacagaaggtgcggccctcccatactaacaatccaaagactagtggctccggcgagggcagaggaagtctactaacctgcggagatgtggaagaaaatcctggcccacatatgaccgagtacaagcccacggtgcgcctcgccacccgcgacgacgtccccagggccgtacgcaccctcgccgccgcgttcgccgactaccccgccacgcgccacaccgtcgatccggaccgccacatcgagcgggtcaccgagctgcaagaactcttcctcacgcgcgtcgggctcgacatcggcaaggtgtgggtcgcggacgacggcgccgcggtggcggtctggaccacgccggagagcgtcgaagcgggggcggtgttcgccgagatcggcccgcgcatggccgagttgagcggttcccggctggccgcgcagcaacagatggaaggcctcctggcgccgcaccggcccaaggagcccgcgtggttcctggccaccgtcggcgtctcgcccgaccaccagggcaagggtctgggcagcgccgtcgtgctccccggagtggaggcggccgagcgcgccggggtgcccgccttcctggagacctccgcgccccgcaacctccccttctacgagcggctcggcttcaccgtcaccgccgacgtcgaggtgcccgaaggaccgcgcacctggtgcatgacccgcaagcccggtgcctga

SEQ ID NO: 1743 - DNA, 3324 bp, Artificial Sequence
  Synthetic Polynucleotides
atggccttaccagtgaccgccttgctcctgccgctggccttgctgctccacgccgccaggccggacatccagatgacacagactacatcctccctgtctgcctctctgggagacagagtcaccatcagttgcagggcaagtcaggacattagtaaatatttaaattggtatcagcagaaaccagatggaactgttaaactcctgatctaccatacatcaagattacactcaggagtcccatcaaggttcagtggcagtgggtctggaacagattattctctcaccattagcaacctggagcaagaagatattgccacttacttttgccaacagggtaatacgcttccgtacacgttcggaggggggaccaagctggagatcacaggtggcggtggctcgggcggtggtgggtcgggtggcggcggatctgaggtgaaactgcaggagtcaggacctggcctggtggcgccctcacagagcctgtccgtcacatgcactgtctcaggggtctcattacccgactatggtgtaagctggattcgccagcctccacgaaagggtctggagtggctgggagtaatatggggtagtgaaaccacatactataattcagctctcaaatccagactgaccatcatcaaggacaactccaagagccaagttttcttaaaaatgaacagtctgcaaactgatgacacagccatttactactgtgccaaacattattactacggtggtagctatgctatggactactggggtcaaggaacctcagtcaccgtctcctcacgcgtagagcagaaactgatctcggaagaggatctggcgaagcccaccacgacgccagcgccgcgaccaccaacaccggcgcccaccatcgcgtcgcagcccctgtccctgcgcccagaggcgtgccggccagcggcggggggcgcagtgcacacgagggggctggacttcgcctgtgacatctacatctgggcgcccttggccgggacttgtggggtccttctcctgtcactggttatcaccctttactgcaaacggggcagaaagaaactcctgtatatattcaaacaaccatttatgagaccagtacaaactactcaagaggaagatggctgtagctgccgatttccagaagaagaagaaggaggatgtgaactgagagtgaagttcagcaggagcgcagacgcccccgcgtaccagcagggccagaaccagctctataacgagctgaatctaggacgaagagaggagtacgatgttttggacaagagacgtggccgggaccctgagatggggggaaagccgagaaggaagaaccctcaggaaggcctgtacaatgaactgcagaaagataagatggcggaggcctacagtgagattgggatgaaaggcgagcgccggaggggcaaggggcacgatggcctttaccagggtctcagtacagccaccaaggacacctacgacgcccttcacatgcaggccctgccccctcgctctagaggatctggagcaacaaacttctcactactcaaacaagcaggtgacgtggaggagaatcccgggcctgggatccggatggcgcactttccgggctttggacagtcactcctgtacggctatcccgtctatgtattcggtgattgtgtgcaagccgattggtgtccagtgtccggtggtctgtgcagtacacggcttcaccggcacgccctgctggcaacttgccccgaacaccagcttacatgggacccaatcgacggtcgcgtagtgtcttctcccctccagtatctgattcctagattgccttcctttccaacacagaggaccagccggaccctgaaggttctgaccccaccgactacaccagtgtcccccaaagtgcctcccgccttcttccaaagtatgagaaaacatactccctataggaatggctgcttggagccaaccctcggtgaccaactcccctcactcgccttccccgaacctggcctgcgcccacagaacatctatactacttggggcaagactgtggtatgcctttacctgtaccagctgagtcccccgatgacatggcccctcatcccccacgtcattttctgtcacccacggcagctgggagcgttccttaccaaagttccgctcaaacgcctggaggaactgctgtataagatgtttctgcacactggtgccgtgatcgtgctgcccgaggacgatctgcccaccacaatgttccagccggtgcgggctccttgcatccagactgcttggtgcacaggccttctgccttaccactccatactcacaacccctggtctgatctggaccttcaatgacggaagccctatgatttcaggaccttgtcccaaggctggacagccatctctggttgtgcagtcatctctgctcatcttcgagaaattccaaaccaaggcctttcatccatcctacctcctctcccatcagctgatacagtacagctccttccacaacttgcacctgctctttgatgaatatacgaatattccagtcagcagaagcttcaacaagggcgaggccgatgataatggcgaccagccgcctgagcctgccgcacagggtgaaagctccacacagaaggtgcggccctcccatactaacaatccaaagactagtggctccggcgagggcagaggaagtctactaacctgcggagatgtggaagaaaatcctggcccacatatgaccgagtacaagcccacggtgcgcctcgccacccgcgacgacgtccccagggccgtacgcaccctcgccgccgcgttcgccgactaccccgccacgcgccacaccgtcgatccggaccgccacatcgagcgggtcaccgagctgcaagaactcttcctcacgcgcgtcgggctcgacatcggcaaggtgtgggtcgcggacgacggcgccgcggtggcggtctggaccacgccggagagcgtcgaagcgggggcggtgttcgccgagatcggcccgcgcatggccgagttgagcggttcccggctggccgcgcagcaacagatggaaggcctcctggcgccgcaccggcccaaggagcccgcgtggttcctggccaccgtcggcgtctcgcccgaccaccagggcaagggtctgggcagcgccgtcgtgctccccggagtggaggcggccgagcgcgccggggtgcccgccttcctggagacctccgcgccccgcaacctccccttctacgagcggctcggcttcaccgtcaccgccgacgtcgaggtgcccgaaggaccgcgcacctggtgcatgacccgcaagcccggtgcctga

SEQ ID NO: 1744 - DNA, 3315 bp, Artificial Sequence
  Synthetic Polynucleotides
atggccttaccagtgaccgccttgctcctgccgctggccttgctgctccacgccgccaggccggacgacatccagatgacccagagcagcagcagcttcagcgtgagcctgggcgacagagtgaccatcacctgcatggccagcgaggacatctacatcagactggcctggtaccagcagaagcccggcaacgcccccagactgctgatcagcgccgccaccagcctggagaccggcgtgcccagcagattcagcggcagcggcagcggcaaggactacaccctgagcatcaccagcctgcagaccgaggacgtgggcacctactactgccagcagtactggagcagcccctggaccttcggcggcggcaccaagctggagatcaacggcggaggcggaagtggaggcggaggatctggcggcggaggctctgacgtgcagctgcaggagagcggccccggcctggtgaagcccagccagagcctgagcctgacctgcaccgtgaccggctacagcatcaccagcgactacacctggaactggatcagacagttccccggcaacaagctggagtggatgggctacatcacctacagcggcagcaccagctacaaccccagcctgaagagcagaaacagcatcaccagagacaccagcaagaaccagttcttcctgcagctgaacagcgtgaccaccgaggacaccgccacctactactgcgccagactgggcagaagatacacaatggactactggggccagggcaccagcgtgaccgtgagcagcacgcgtgagcagaaactgatctcggaagaggatctggcgaagcccaccacgacgccagcgccgcgaccaccaacaccggcgcccaccatcgcgtcgcagcccctgtccctgcgcccagaggcgtgccggccagcggcggggggcgcagtgcacacgagggggctggacttcgcctgtgacatctacatctgggcgcccttggccgggacttgtggggtccttctcctgtcactggttatcaccctttactgcaaacggggcagaaagaaactcctgtatatattcaaacaaccatttatgagaccagtacaaactactcaagaggaagatggctgtagctgccgatttccagaagaagaagaaggaggatgtgaactgagagtgaagttcagcaggagcgcagacgcccccgcgtaccagcagggccagaaccagctctataacgagctgaatctaggacgaagagaggagtacgatgttttggacaagagacgtggccgggaccctgagatggggggaaagccgagaaggaagaaccctcaggaaggcctgtacaatgaactgcagaaagataagatggcggaggcctacagtgagattgggatgaaaggcgagcgccggaggggcaaggggcacgatggcctttaccagggtctcagtacagccaccaaggacacctacgacgcccttcacatgcaggccctgccccctcgctctagaggatctggagcaacaaacttctcactactcaaacaagcaggtgacgtggaggagaatcccgggcctgggatcaccatgactagaggagtgcaggtggagactatctccccaggagacgggcgcaccttccccaagcgcggccagacctgcgtggtgcactacaccgggatgcttgaagatggaaagaaagttgattcctcccgggacagaaacaagccctttaagtttatgctaggcaagcaggaggtgatccgaggctgggaagaaggggttgcccagatgagtgtgggtcagagagccaaactgactatatctccagattatgcctatggtgccactgggcacccaggcatcatcccaccacatgccactctcgtcttcgatgtggagcttctaaaactggaagggatccacatggccacttacgaggttctctgtgaggtggcgcggaaactgggcacggatgacagggaagtggtattgttcctcctaaacgtgttcatacctcaacccacactggcccaattaattggagctcttagagctttaaaggaggagggcaggttaacgtttcccctgttagcggaatgtctgtttcgtgcaggtcgcagagacctcttgcgcgacctgcttcacttagacccgcgttttttagagcgccacctagcgggcacaatgagttatttcagcccttatcagctcactgttctccacgtagacggggagctgtgtgcgagggatattaggtctttgatatttttaagcaaggacactatagggtctcgcagcacaccacagacattcttacactgggtgtactgtatggaaaacttagacctactgggtcccactgacgtggatgccctaatgtcaatgcttagatctttgtcaagagtagacctacagcgccaagtgcaaaccctaatgggccttcacctttccggcccatcacactcccaacactatcgccatacaccactcgagaccgatttctacgactacaaggacgacgatgacaagactagtggctccggcgagggcagaggaagtctactaacctgcggagatgtggaagaaaatcctggcccaatggtgagcaagggcgaggagctgttcaccggggtggtgcccatcctggtcgagctggacggcgacgtaaacggccacaagttcagcgtgtccggcgagggcgagggcgatgccacctacggcaagctgaccctgaagttcatctgcaccaccggcaagctgcccgtgccctggcccaccctcgtgaccaccctgacctacggcgtgcagtgcttcagccgctaccccgaccacatgaagcagcacgacttcttcaagtccgccatgcccgaaggctacgtccaggagcgcaccatcttcttcaaggacgacggcaactacaagacccgcgccgaggtgaagttcgagggcgacaccctggtgaaccgcatcgagctgaagggcatcgacttcaaggaggacggcaacatcctggggcacaagctggagtacaactacaacagccacaacgtctatatcatggccgacaagcagaagaacggcatcaaggtgaacttcaagatccgccacaacatcgaggacggcagcgtgcagctcgccgaccactaccagcagaacacccccatcggcgacggccccgtgctgctgcccgacaaccactacctgagcacccagtccgccctgagcaaagaccccaacgagaagcgcgatcacatggtcctgctggagttcgtgaccgccgccgggatcactctcggcatggacgagctgtacaagtaa

SEQ ID NO: 1745 - DNA, 3189 bp, Artificial Sequence
  Synthetic Polynucleotides
atggccttaccagtgaccgccttgctcctgccgctggccttgctgctccacgccgccaggccggacgacatccagatgacccagagcagcagcagcttcagcgtgagcctgggcgacagagtgaccatcacctgcatggccagcgaggacatctacatcagactggcctggtaccagcagaagcccggcaacgcccccagactgctgatcagcgccgccaccagcctggagaccggcgtgcccagcagattcagcggcagcggcagcggcaaggactacaccctgagcatcaccagcctgcagaccgaggacgtgggcacctactactgccagcagtactggagcagcccctggaccttcggcggcggcaccaagctggagatcaacggcggaggcggaagtggaggcggaggatctggcggcggaggctctgacgtgcagctgcaggagagcggccccggcctggtgaagcccagccagagcctgagcctgacctgcaccgtgaccggctacagcatcaccagcgactacacctggaactggatcagacagttccccggcaacaagctggagtggatgggctacatcacctacagcggcagcaccagctacaaccccagcctgaagagcagaaacagcatcaccagagacaccagcaagaaccagttcttcctgcagctgaacagcgtgaccaccgaggacaccgccacctactactgcgccagactgggcagaagatacacaatggactactggggccagggcaccagcgtgaccgtgagcagcacgcgtgagcagaaactgatctcggaagaggatctggcgaagcccaccacgacgccagcgccgcgaccaccaacaccggcgcccaccatcgcgtcgcagcccctgtccctgcgcccagaggcgtgccggccagcggcggggggcgcagtgcacacgagggggctggacttcgcctgtgacatctacatctgggcgcccttggccgggacttgtggggtccttctcctgtcactggttatcaccctttactgcaaacggggcagaaagaaactcctgtatatattcaaacaaccatttatgagaccagtacaaactactcaagaggaagatggctgtagctgccgatttccagaagaagaagaaggaggatgtgaactgagagtgaagttcagcaggagcgcagacgcccccgcgtaccagcagggccagaaccagctctataacgagctgaatctaggacgaagagaggagtacgatgttttggacaagagacgtggccgggaccctgagatggggggaaagccgagaaggaagaaccctcaggaaggcctgtacaatgaactgcagaaagataagatggcggaggcctacagtgagattgggatgaaaggcgagcgccggaggggcaaggggcacgatggcctttaccagggtctcagtacagccaccaaggacacctacgacgcccttcacatgcaggccctgccccctcgctctagaggatctggagcaacaaacttctcactactcaaacaagcaggtgacgtggaggagaatcccgggcctgggatcctgatggactggatttggcgcatccttttccttgtcggcgctgctaccggcgcgcattctgagattgtactgactcagtctcccgctactctgtccctttcccccggcgaacgcgcgaccctctcatgctcagccagcatctctgtgtcttacatgtattggtatcagcaaaagcctgggcaagcgccaagactgctgatatacgacatgtccaacctggcaagcggcatcccggcgagattctccggatctggctcagggaccgattttacgctcactatcagttccttggagcctgaggatttcgcggtgtattactgtatgcagtggagcggttatccttacacatttggaggcggaactaaagtggagataaagggcggtggcggttcaggtggagggggaagcggtggtggtggctcagaggtgcaactcgtggagtccggtggcggtctggtgcagccaggggggtccttgcgcctgagctgcgccgcttctgggtttacgttttccccattcgctatgtcctgggtccggcaggcgcccggtaaaggtctggaatgggtggcaaagatttccccaggggggtcttggacttattactccgacaccgtgacaggtcgatttaccatcagcagggataacgccaaaaacagcctctacctccagatgaactccttgcgagccgaagataccgccgtctattactgtgccaggcagctgtggggatactacgcgctggacatttgggggcagggaacaactgtgactgtatcctcactcgagaccgatttctacgactacaaggacgacgatgacaagactagtggctccggcgagggcagaggaagtctactaacctgcggagatgtggaagaaaatcctggcccaatggtgagcaagggcgaggagctgttcaccggggtggtgcccatcctggtcgagctggacggcgacgtaaacggccacaagttcagcgtgtccggcgagggcgagggcgatgccacctacggcaagctgaccctgaagttcatctgcaccaccggcaagctgcccgtgccctggcccaccctcgtgaccaccctgacctacggcgtgcagtgcttcagccgctaccccgaccacatgaagcagcacgacttcttcaagtccgccatgcccgaaggctacgtccaggagcgcaccatcttcttcaaggacgacggcaactacaagacccgcgccgaggtgaagttcgagggcgacaccctggtgaaccgcatcgagctgaagggcatcgacttcaaggaggacggcaacatcctggggcacaagctggagtacaactacaacagccacaacgtctatatcatggccgacaagcagaagaacggcatcaaggtgaacttcaagatccgccacaacatcgaggacggcagcgtgcagctcgccgaccactaccagcagaacacccccatcggcgacggccccgtgctgctgcccgacaaccactacctgagcacccagtccgccctgagcaaagaccccaacgagaagcgcgatcacatggtcctgctggagttcgtgaccgccgccgggatcactctcggcatggacgagctgtacaagtaa

SEQ ID NO: 1746 - DNA, 3192 bp, Artificial Sequence
  Synthetic Polynucleotides
atggccttaccagtgaccgccttgctcctgccgctggccttgctgctccacgccgccaggccggacgacatccagatgacccagagcagcagcagcttcagcgtgagcctgggcgacagagtgaccatcacctgcatggccagcgaggacatctacatcagactggcctggtaccagcagaagcccggcaacgcccccagactgctgatcagcgccgccaccagcctggagaccggcgtgcccagcagattcagcggcagcggcagcggcaaggactacaccctgagcatcaccagcctgcagaccgaggacgtgggcacctactactgccagcagtactggagcagcccctggaccttcggcggcggcaccaagctggagatcaacggcggaggcggaagtggaggcggaggatctggcggcggaggctctgacgtgcagctgcaggagagcggccccggcctggtgaagcccagccagagcctgagcctgacctgcaccgtgaccggctacagcatcaccagcgactacacctggaactggatcagacagttccccggcaacaagctggagtggatgggctacatcacctacagcggcagcaccagctacaaccccagcctgaagagcagaaacagcatcaccagagacaccagcaagaaccagttcttcctgcagctgaacagcgtgaccaccgaggacaccgccacctactactgcgccagactgggcagaagatacacaatggactactggggccagggcaccagcgtgaccgtgagcagcacgcgtgagcagaaactgatctcggaagaggatctggcgaagcccaccacgacgccagcgccgcgaccaccaacaccggcgcccaccatcgcgtcgcagcccctgtccctgcgcccagaggcgtgccggccagcggcggggggcgcagtgcacacgagggggctggacttcgcctgtgacatctacatctgggcgcccttggccgggacttgtggggtccttctcctgtcactggttatcaccctttactgcaaacggggcagaaagaaactcctgtatatattcaaacaaccatttatgagaccagtacaaactactcaagaggaagatggctgtagctgccgatttccagaagaagaagaaggaggatgtgaactgagagtgaagttcagcaggagcgcagacgcccccgcgtaccagcagggccagaaccagctctataacgagctgaatctaggacgaagagaggagtacgatgttttggacaagagacgtggccgggaccctgagatggggggaaagccgagaaggaagaaccctcaggaaggcctgtacaatgaactgcagaaagataagatggcggaggcctacagtgagattgggatgaaaggcgagcgccggaggggcaaggggcacgatggcctttaccagggtctcagtacagccaccaaggacacctacgacgcccttcacatgcaggccctgccccctcgctctagaggatctggagcaacaaacttctcactactcaaacaagcaggtgacgtggaggagaatcccgggcctgggatcctgatggactggatttggcgcatccttttccttgtcggcgctgctaccggcgcgcattctcaggtgcagctccaggagagtggcccaggacttgtgaagccaagtgaaactctctcactcacttgtgctgtgagtggatacagtatcagtgacgatcacgctgtcagctgggtacgacaacctcccggagagggtctggagtggatcggtttcatttcctatagtggcattacaaactacaaccccacacttcaggaccgcgtcacaatttcacgggacaattccaagaacaccctgtatctccagatgaatagtctgagggcagaggatacggctgtgtactactgtgcccggctgctcgcccgcgcaacagctatggacgtgtggggtgaggggaccctggtgaccgtaagttccggcggtggcggttcaggtggagggggaagcggtggtggtggctcagacattcaaatgacgcagagcccctcctctctgtcagcgagcgtgggagatagtgtcacgattacttgtcaggccagccaagacatttcctcatatctgaactggtatcagcagaagcccggcaaggcccccgaactgttgatctactacggcagcgagttggaatccggcgttccttctcgcttttccgggtccggctctggaacagatttcaccttcaccatttctagccttgaagcagaagacgccgccacttactactgcgggcaaggtaaccgattgccgtacaccttcggccagggtacaaaagtggaaatcgagctcgagaccgatttctacgactacaaggacgacgatgacaagactagtggctccggcgagggcagaggaagtctactaacctgcggagatgtggaagaaaatcctggcccaatggtgagcaagggcgaggagctgttcaccggggtggtgcccatcctggtcgagctggacggcgacgtaaacggccacaagttcagcgtgtccggcgagggcgagggcgatgccacctacggcaagctgaccctgaagttcatctgcaccaccggcaagctgcccgtgccctggcccaccctcgtgaccaccctgacctacggcgtgcagtgcttcagccgctaccccgaccacatgaagcagcacgacttcttcaagtccgccatgcccgaaggctacgtccaggagcgcaccatcttcttcaaggacgacggcaactacaagacccgcgccgaggtgaagttcgagggcgacaccctggtgaaccgcatcgagctgaagggcatcgacttcaaggaggacggcaacatcctggggcacaagctggagtacaactacaacagccacaacgtctatatcatggccgacaagcagaagaacggcatcaaggtgaacttcaagatccgccacaacatcgaggacggcagcgtgcagctcgccgaccactaccagcagaacacccccatcggcgacggccccgtgctgctgcccgacaaccactacctgagcacccagtccgccctgagcaaagaccccaacgagaagcgcgatcacatggtcctgctggagttcgtgaccgccgccgggatcactctcggcatggacgagctgtacaagtaa

SEQ ID NO: 1747 - DNA, 2271 bp, Artificial Sequence
  Synthetic Polynucleotides
atggccttaccagtgaccgccttgctcctgccgctggccttgctgctccacgccgccaggccggacgacatccagatgacccagagcagcagcagcttcagcgtgagcctgggcgacagagtgaccatcacctgcatggccagcgaggacatctacatcagactggcctggtaccagcagaagcccggcaacgcccccagactgctgatcagcgccgccaccagcctggagaccggcgtgcccagcagattcagcggcagcggcagcggcaaggactacaccctgagcatcaccagcctgcagaccgaggacgtgggcacctactactgccagcagtactggagcagcccctggaccttcggcggcggcaccaagctggagatcaacggcggaggcggaagtggaggcggaggatctggcggcggaggctctgacgtgcagctgcaggagagcggccccggcctggtgaagcccagccagagcctgagcctgacctgcaccgtgaccggctacagcatcaccagcgactacacctggaactggatcagacagttccccggcaacaagctggagtggatgggctacatcacctacagcggcagcaccagctacaaccccagcctgaagagcagaaacagcatcaccagagacaccagcaagaaccagttcttcctgcagctgaacagcgtgaccaccgaggacaccgccacctactactgcgccagactgggcagaagatacacaatggactactggggccagggcaccagcgtgaccgtgagcagcacgcgtgagcagaaactgatctcggaagaggatctgaaaattgaagttatgtatcctcctccttacctagacaatgagaagagcaatggaaccattatccatgtgaaagggaaacacctttgtccaagtcccctatttcccggaccttctaagcccttttgggtgctggtggtggttgggggagtcctggcttgctatagcttgctagtaacagtggcctttattattttctgggtgaggagtaagaggagcaggctcctgcacagtgactacatgaacatgactccacgccgccccggacccacccgcaagcattaccagccctatgccccaccacgcgacttcgcagcctatcgctccagagtgaagttcagcaggagcgcagacgcccccgcgtaccagcagggccagaaccagctctataacgagctcaatctaggacgaagagaggagtacgatgttttggacaagagacgtggccgggaccctgagatggggggaaagccgagaaggaagaaccctcaggaaggcctgtacaatgaactgcagaaagataagatggcggaggcctacagtgagattgggatgaaaggcgagcgccggaggggcaaggggcacgatggcctttaccagggtctcagtacagccaccaaggacacctacgacgcccttcacatgcaggccctgccccctcgctctagtggctccggcgagggcagaggaagtctactaacctgcggagatgtggaagaaaatcctggcccaatggtgagcaagggcgaggagctgttcaccggggtggtgcccatcctggtcgagctggacggcgacgtaaacggccacaagttcagcgtgtccggcgagggcgagggcgatgccacctacggcaagctgaccctgaagttcatctgcaccaccggcaagctgcccgtgccctggcccaccctcgtgaccaccctgacctacggcgtgcagtgcttcagccgctaccccgaccacatgaagcagcacgacttcttcaagtccgccatgcccgaaggctacgtccaggagcgcaccatcttcttcaaggacgacggcaactacaagacccgcgccgaggtgaagttcgagggcgacaccctggtgaaccgcatcgagctgaagggcatcgacttcaaggaggacggcaacatcctggggcacaagctggagtacaactacaacagccacaacgtctatatcatggccgacaagcagaagaacggcatcaaggtgaacttcaagatccgccacaacatcgaggacggcagcgtgcagctcgccgaccactaccagcagaacacccccatcggcgacggccccgtgctgctgcccgacaaccactacctgagcacccagtccgccctgagcaaagaccccaacgagaagcgcgatcacatggtcctgctggagttcgtgaccgccgccgggatcactctcggcatggacgagctgtacaagtaa

SEQ ID NO: 1748 - DNA, 2568 bp, Artificial Sequence
  Synthetic Polynucleotides
atggccttaccagtgaccgccttgctcctgccgctggccttgctgctccacgccgccaggccggacgacatccagatgacccagagcagcagcagcttcagcgtgagcctgggcgacagagtgaccatcacctgcatggccagcgaggacatctacatcagactggcctggtaccagcagaagcccggcaacgcccccagactgctgatcagcgccgccaccagcctggagaccggcgtgcccagcagattcagcggcagcggcagcggcaaggactacaccctgagcatcaccagcctgcagaccgaggacgtgggcacctactactgccagcagtactggagcagcccctggaccttcggcggcggcaccaagctggagatcaacggcggaggcggaagtggaggcggaggatctggcggcggaggctctgacgtgcagctgcaggagagcggccccggcctggtgaagcccagccagagcctgagcctgacctgcaccgtgaccggctacagcatcaccagcgactacacctggaactggatcagacagttccccggcaacaagctggagtggatgggctacatcacctacagcggcagcaccagctacaaccccagcctgaagagcagaaacagcatcaccagagacaccagcaagaaccagttcttcctgcagctgaacagcgtgaccaccgaggacaccgccacctactactgcgccagactgggcagaagatacacaatggactactggggccagggcaccagcgtgaccgtgagcagcacgcgtgagcagaaactgatctcggaagaggatctggcgaagcccaccacgacgccagcgccgcgaccaccaacaccggcgcccaccatcgcgtcgcagcccctgtccctgcgcccagaggcgtgccggccagcggcggggggcgcagtgcacacgagggggctggacttcgcctgtgacatctacatctgggcgcccttggccgggacttgtggggtccttctcctgtcactggttatcaccctttactgcaaacggggcagaaagaaactcctgtatatattcaaacaaccatttatgagaccagtacaaactactcaagaggaagatggctgtagctgccgatttccagaagaagaagaaggaggatgtgaactgagagtgaagttcagcaggagcgcagacgcccccgcgtaccagcagggccagaaccagctctataacgagctgaatctaggacgaagagaggagtacgatgttttggacaagagacgtggccgggaccctgagatggggggaaagccgagaaggaagaaccctcaggaaggcctgtacaatgaactgcagaaagataagatggcggaggcctacagtgagattgggatgaaaggcgagcgccggaggggcaaggggcacgatggcctttaccagggtctcagtacagccaccaaggacacctacgacgcccttcacatgcaggccctgccccctcgctctagaggatctggagcaacaaacttctcactactcaaacaagcaggtgacgtggaggagaatcccgggcctgggatcctgaccatggactggatttggcgcatccttttccttgtcggcgctgctaccggcgcgcattctggccacagaccactggacaagaagcgggaagaggcgccctccctgcgcccagctcctccacccatcagtgggggtggctacagatcaggtggatcactcgagaccgatttctacgactacaaggacgacgatgacaagactagtggctccggcgagggcagaggaagtctactaacctgcggagatgtggaagaaaatcctggcccaatggtgagcaagggcgaggagctgttcaccggggtggtgcccatcctggtcgagctggacggcgacgtaaacggccacaagttcagcgtgtccggcgagggcgagggcgatgccacctacggcaagctgaccctgaagttcatctgcaccaccggcaagctgcccgtgccctggcccaccctcgtgaccaccctgacctacggcgtgcagtgcttcagccgctaccccgaccacatgaagcagcacgacttcttcaagtccgccatgcccgaaggctacgtccaggagcgcaccatcttcttcaaggacgacggcaactacaagacccgcgccgaggtgaagttcgagggcgacaccctggtgaaccgcatcgagctgaagggcatcgacttcaaggaggacggcaacatcctggggcacaagctggagtacaactacaacagccacaacgtctatatcatggccgacaagcagaagaacggcatcaaggtgaacttcaagatccgccacaacatcgaggacggcagcgtgcagctcgccgaccactaccagcagaacacccccatcggcgacggccccgtgctgctgcccgacaaccactacctgagcacccagtccgccctgagcaaagaccccaacgagaagcgcgatcacatggtcctgctggagttcgtgaccgccgccgggatcactctcggcatggacgagctgtacaagtaa

SEQ ID NO: 1749 - DNA, 3018 bp, Artificial Sequence
  Synthetic Polynucleotides
atggccttaccagtgaccgccttgctcctgccgctggccttgctgctccacgccgccaggccggacgacatccagatgacccagagcagcagcagcttcagcgtgagcctgggcgacagagtgaccatcacctgcatggccagcgaggacatctacatcagactggcctggtaccagcagaagcccggcaacgcccccagactgctgatcagcgccgccaccagcctggagaccggcgtgcccagcagattcagcggcagcggcagcggcaaggactacaccctgagcatcaccagcctgcagaccgaggacgtgggcacctactactgccagcagtactggagcagcccctggaccttcggcggcggcaccaagctggagatcaacggcggaggcggaagtggaggcggaggatctggcggcggaggctctgacgtgcagctgcaggagagcggccccggcctggtgaagcccagccagagcctgagcctgacctgcaccgtgaccggctacagcatcaccagcgactacacctggaactggatcagacagttccccggcaacaagctggagtggatgggctacatcacctacagcggcagcaccagctacaaccccagcctgaagagcagaaacagcatcaccagagacaccagcaagaaccagttcttcctgcagctgaacagcgtgaccaccgaggacaccgccacctactactgcgccagactgggcagaagatacacaatggactactggggccagggcaccagcgtgaccgtgagcagcacgcgtgagcagaaactgatctcggaagaggatctggcgaagcccaccacgacgccagcgccgcgaccaccaacaccggcgcccaccatcgcgtcgcagcccctgtccctgcgcccagaggcgtgccggccagcggcggggggcgcagtgcacacgagggggctggacttcgcctgtgacatctacatctgggcgcccttggccgggacttgtggggtccttctcctgtcactggttatcaccctttactgcaaacggggcagaaagaaactcctgtatatattcaaacaaccatttatgagaccagtacaaactactcaagaggaagatggctgtagctgccgatttccagaagaagaagaaggaggatgtgaactgagagtgaagttcagcaggagcgcagacgcccccgcgtaccagcagggccagaaccagctctataacgagctgaatctaggacgaagagaggagtacgatgttttggacaagagacgtggccgggaccctgagatggggggaaagccgagaaggaagaaccctcaggaaggcctgtacaatgaactgcagaaagataagatggcggaggcctacagtgagattgggatgaaaggcgagcgccggaggggcaaggggcacgatggcctttaccagggtctcagtacagccaccaaggacacctacgacgcccttcacatgcaggccctgccccctcgctctagaggatctggagcaacaaacttctcactactcaaacaagcaggtgacgtggaggagaatcccgggcctgggatccacatgtccgactccaaggaggtccctagccttccatttttgcgacacttgctcgaagagttggacagccatgaggacagcttgctgctgtttctgtgtcacgacgcggccccgggctgcacgacggtcacgcaagctttgtgctcgcttagccaacagcgcaagctgaccctcgcggctctggtcgagatgctctacgtgctgcagcgtatggatcttctcaagagccgcttcgggctcagcaaggagggggccgagcaattgctgggcacaagctttctcacgcgctaccgcaagctcatggtttgcgtgggtgaggagctcgactcgagcgagctacgcgctctacgcttgttcgcgtgcaacctgaatccgagcctgagcacggcgctttctgagagcagccgctttgtcgagcttgtactcgcgcttgaaaacgtaggactcgtctcgccatcgagtgtttccgtgcttgcggacatgttgcgcactcttcggcgcctcgatttgtgccagcagcttgttgagtacgaacaacaagagcaagccaggtaccgttactgttacgcggcctcgccctcattgccagttcgtacgttacgtcgggggcacggcgcgagtgaacacgagcagctgtgcatgcccgtgcaagaatcctctgacagccccgagctgctgcgcacgcccgtacaagaatcctccagcgacagccccgagcaaacgactctcgagaccgatttctacgactacaaggacgacgatgacaagactagtggctccggcgagggcagaggaagtctactaacctgcggagatgtggaagaaaatcctggcccacatatgaccgagtacaagcccacggtgcgcctcgccacccgcgacgacgtccccagggccgtacgcaccctcgccgccgcgttcgccgactaccccgccacgcgccacaccgtcgatccggaccgccacatcgagcgggtcaccgagctgcaagaactcttcctcacgcgcgtcgggctcgacatcggcaaggtgtgggtcgcggacgacggcgccgcggtggcggtctggaccacgccggagagcgtcgaagcgggggcggtgttcgccgagatcggcccgcgcatggccgagttgagcggttcccggctggccgcgcagcaacagatggaaggcctcctggcgccgcaccggcccaaggagcccgcgtggttcctggccaccgtcggcgtctcgcccgaccaccagggcaagggtctgggcagcgccgtcgtgctccccggagtggaggcggccgagcgcgccggggtgcccgccttcctggagacctccgcgccccgcaacctccccttctacgagcggctcggcttcaccgtcaccgccgacgtcgaggtgcccgaaggaccgcgcacctggtgcatgacccgcaagcccggtgcctga

SEQ ID NO: 1750 - DNA, 2904 bp, Artificial Sequence
  Synthetic Polynucleotides
atggccttaccagtgaccgccttgctcctgccgctggccttgctgctccacgccgccaggccggacatccagatgacacagactacatcctccctgtctgcctctctgggagacagagtcaccatcagttgcagggcaagtcaggacattagtaaatatttaaattggtatcagcagaaaccagatggaactgttaaactcctgatctaccatacatcaagattacactcaggagtcccatcaaggttcagtggcagtgggtctggaacagattattctctcaccattagcaacctggagcaagaagatattgccacttacttttgccaacagggtaatacgcttccgtacacgttcggaggggggaccaagctggagatcacaggtggcggtggctcgggcggtggtgggtcgggtggcggcggatctgaggtgaaactgcaggagtcaggacctggcctggtggcgccctcacagagcctgtccgtcacatgcactgtctcaggggtctcattacccgactatggtgtaagctggattcgccagcctccacgaaagggtctggagtggctgggagtaatatggggtagtgaaaccacatactataattcagctctcaaatccagactgaccatcatcaaggacaactccaagagccaagttttcttaaaaatgaacagtctgcaaactgatgacacagccatttactactgtgccaaacattattactacggtggtagctatgctatggactactggggtcaaggaacctcagtcaccgtctcctcacgcgtagagcagaaactgatctcggaagaggatctggcgaagcccaccacgacgccagcgccgcgaccaccaacaccggcgcccaccatcgcgtcgcagcccctgtccctgcgcccagaggcgtgccggccagcggcggggggcgcagtgcacacgagggggctggacttcgcctgtgacatctacatctgggcgcccttggccgggacttgtggggtccttctcctgtcactggttatcaccctttactgcgggcgcgccagagtgaagttcagcaggagcgcagacgcccccgcgtaccagcagggccagaaccagctctataacgagctgaatctaggacgaagagaggagtacgatgttttggacaagagacgtggccgggaccctgagatggggggaaagccgagaaggaagaaccctcaggaaggcctgtacaatgaactgcagaaagataagatggcggaggcctacagtgagattgggatgaaaggcgagcgccggaggggcaaggggcacgatggcctttaccagggtctcagtacagccaccaaggacacctacgacgcccttcacatgcaggccctgccccctcgctctagaggatctggagcaacaaacttctcactactcaaacaagcaggtgacgtggaggagaatcccgggcctgggatccacatgtccgactccaaggaggtccctagccttccatttttgcgacacttgctcgaagagttggacagccatgaggacagcttgctgctgtttctgtgtcacgacgcggccccgggctgcacgacggtcacgcaagctttgtgctcgcttagccaacagcgcaagctgaccctcgcggctctggtcgagatgctctacgtgctgcagcgtatggatcttctcaagagccgcttcgggctcagcaaggagggggccgagcaattgctgggcacaagctttctcacgcgctaccgcaagctcatggtttgcgtgggtgaggagctcgactcgagcgagctacgcgctctacgcttgttcgcgtgcaacctgaatccgagcctgagcacggcgctttctgagagcagccgctttgtcgagcttgtactcgcgcttgaaaacgtaggactcgtctcgccatcgagtgtttccgtgcttgcggacatgttgcgcactcttcggcgcctcgatttgtgccagcagcttgttgagtacgaacaacaagagcaagccaggtaccgttactgttacgcggcctcgccctcattgccagttcgtacgttacgtcgggggcacggcgcgagtgaacacgagcagctgtgcatgcccgtgcaagaatcctctgacagccccgagctgctgcgcacgcccgtacaagaatcctccagcgacagccccgagcaaacgactctcgagaccgatttctacgactacaaggacgacgatgacaagactagtggctccggcgagggcagaggaagtctactaacctgcggagatgtggaagaaaatcctggcccacatatgaccgagtacaagcccacggtgcgcctcgccacccgcgacgacgtccccagggccgtacgcaccctcgccgccgcgttcgccgactaccccgccacgcgccacaccgtcgatccggaccgccacatcgagcgggtcaccgagctgcaagaactcttcctcacgcgcgtcgggctcgacatcggcaaggtgtgggtcgcggacgacggcgccgcggtggcggtctggaccacgccggagagcgtcgaagcgggggcggtgttcgccgagatcggcccgcgcatggccgagttgagcggttcccggctggccgcgcagcaacagatggaaggcctcctggcgccgcaccggcccaaggagcccgcgtggttcctggccaccgtcggcgtctcgcccgaccaccagggcaagggtctgggcagcgccgtcgtgctccccggagtggaggcggccgagcgcgccggggtgcccgccttcctggagacctccgcgccccgcaacctccccttctacgagcggctcggcttcaccgtcaccgccgacgtcgaggtgcccgaaggaccgcgcacctggtgcatgacccgcaagcccggtgcctga

SEQ ID NO: 1751 - DNA, 3021 bp, Artificial Sequence
  Synthetic Polynucleotides
atggccttaccagtgaccgccttgctcctgccgctggccttgctgctccacgccgccaggccggacatccagatgacacagactacatcctccctgtctgcctctctgggagacagagtcaccatcagttgcagggcaagtcaggacattagtaaatatttaaattggtatcagcagaaaccagatggaactgttaaactcctgatctaccatacatcaagattacactcaggagtcccatcaaggttcagtggcagtgggtctggaacagattattctctcaccattagcaacctggagcaagaagatattgccacttacttttgccaacagggtaatacgcttccgtacacgttcggaggggggaccaagctggagatcacaggtggcggtggctcgggcggtggtgggtcgggtggcggcggatctgaggtgaaactgcaggagtcaggacctggcctggtggcgccctcacagagcctgtccgtcacatgcactgtctcaggggtctcattacccgactatggtgtaagctggattcgccagcctccacgaaagggtctggagtggctgggagtaatatggggtagtgaaaccacatactataattcagctctcaaatccagactgaccatcatcaaggacaactccaagagccaagttttcttaaaaatgaacagtctgcaaactgatgacacagccatttactactgtgccaaacattattactacggtggtagctatgctatggactactggggtcaaggaacctcagtcaccgtctcctcacgcgtagagcagaaactgatctcggaagaggatctggcgaagcccaccacgacgccagcgccgcgaccaccaacaccggcgcccaccatcgcgtcgcagcccctgtccctgcgcccagaggcgtgccggccagcggcggggggcgcagtgcacacgagggggctggacttcgcctgtgacatctacatctgggcgcccttggccgggacttgtggggtccttctcctgtcactggttatcaccctttactgcaaacggggcagaaagaaactcctgtatatattcaaacaaccatttatgagaccagtacaaactactcaagaggaagatggctgtagctgccgatttccagaagaagaagaaggaggatgtgaactgagagtgaagttcagcaggagcgcagacgcccccgcgtaccagcagggccagaaccagctctataacgagctgaatctaggacgaagagaggagtacgatgttttggacaagagacgtggccgggaccctgagatggggggaaagccgagaaggaagaaccctcaggaaggcctgtacaatgaactgcagaaagataagatggcggaggcctacagtgagattgggatgaaaggcgagcgccggaggggcaaggggcacgatggcctttaccagggtctcagtacagccaccaaggacacctacgacgcccttcacatgcaggccctgccccctcgctctagaggatctggagcaacaaacttctcactactcaaacaagcaggtgacgtggaggagaatcccgggcctgggatccacatgtccgactccaaggaggtccctagccttccatttttgcgacacttgctcgaagagttggacagccatgaggacagcttgctgctgtttctgtgtcacgacgcggccccgggctgcacgacggtcacgcaagctttgtgctcgcttagccaacagcgcaagctgaccctcgcggctctggtcgagatgctctacgtgctgcagcgtatggatcttctcaagagccgcttcgggctcagcaaggagggggccgagcaattgctgggcacaagctttctcacgcgctaccgcaagctcatggtttgcgtgggtgaggagctcgactcgagcgagctacgcgctctacgcttgttcgcgtgcaacctgaatccgagcctgagcacggcgctttctgagagcagccgctttgtcgagcttgtactcgcgcttgaaaacgtaggactcgtctcgccatcgagtgtttccgtgcttgcggacatgttgcgcactcttcggcgcctcgatttgtgccagcagcttgttgagtacgaacaacaagagcaagccaggtaccgttactgttacgcggcctcgccctcattgccagttcgtacgttacgtcgggggcacggcgcgagtgaacacgagcagctgtgcatgcccgtgcaagaatcctctgacagccccgagctgctgcgcacgcccgtacaagaatcctccagcgacagccccgagcaaacgactctcgagaccgatttctacgactacaaggacgacgatgacaagactagtggctccggcgagggcagaggaagtctactaacctgcggagatgtggaagaaaatcctggcccacatatgaccgagtacaagcccacggtgcgcctcgccacccgcgacgacgtccccagggccgtacgcaccctcgccgccgcgttcgccgactaccccgccacgcgccacaccgtcgatccggaccgccacatcgagcgggtcaccgagctgcaagaactcttcctcacgcgcgtcgggctcgacatcggcaaggtgtgggtcgcggacgacggcgccgcggtggcggtctggaccacgccggagagcgtcgaagcgggggcggtgttcgccgagatcggcccgcgcatggccgagttgagcggttcccggctggccgcgcagcaacagatggaaggcctcctggcgccgcaccggcccaaggagcccgcgtggttcctggccaccgtcggcgtctcgcccgaccaccagggcaagggtctgggcagcgccgtcgtgctccccggagtggaggcggccgagcgcgccggggtgcccgccttcctggagacctccgcgccccgcaacctccccttctacgagcggctcggcttcaccgtcaccgccgacgtcgaggtgcccgaaggaccgcgcacctggtgcatgacccgcaagcccggtgcctga

SEQ ID NO: 1752 - DNA, 3345 bp, Artificial Sequence
  Synthetic Polynucleotides
atggccttaccagtgaccgccttgctcctgccgctggccttgctgctccacgccgccaggccggacatccagatgacacagactacatcctccctgtctgcctctctgggagacagagtcaccatcagttgcagggcaagtcaggacattagtaaatatttaaattggtatcagcagaaaccagatggaactgttaaactcctgatctaccatacatcaagattacactcaggagtcccatcaaggttcagtggcagtgggtctggaacagattattctctcaccattagcaacctggagcaagaagatattgccacttacttttgccaacagggtaatacgcttccgtacacgttcggaggggggaccaagctggagatcacaggtggcggtggctcgggcggtggtgggtcgggtggcggcggatctgaggtgaaactgcaggagtcaggacctggcctggtggcgccctcacagagcctgtccgtcacatgcactgtctcaggggtctcattacccgactatggtgtaagctggattcgccagcctccacgaaagggtctggagtggctgggagtaatatggggtagtgaaaccacatactataattcagctctcaaatccagactgaccatcatcaaggacaactccaagagccaagttttcttaaaaatgaacagtctgcaaactgatgacacagccatttactactgtgccaaacattattactacggtggtagctatgctatggactactggggtcaaggaacctcagtcaccgtctcctcacgcgtagagcagaaactgatctcggaagaggatctggcgaagcccaccacgacgccagcgccgcgaccaccaacaccggcgcccaccatcgcgtcgcagcccctgtccctgcgcccagaggcgtgccggccagcggcggggggcgcagtgcacacgagggggctggacttcgcctgtgacatctacatctgggcgcccttggccgggacttgtggggtccttctcctgtcactggttatcaccctttactgcaaacggggcagaaagaaactcctgtatatattcaaacaaccatttatgagaccagtacaaactactcaagaggaagatggctgtagctgccgatttccagaagaagaagaaggaggatgtgaactgagagtgaagttcagcaggagcgcagacgcccccgcgtaccagcagggccagaaccagctctataacgagctgaatctaggacgaagagaggagtacgatgttttggacaagagacgtggccgggaccctgagatggggggaaagccgagaaggaagaaccctcaggaaggcctgtacaatgaactgcagaaagataagatggcggaggcctacagtgagattgggatgaaaggcgagcgccggaggggcaaggggcacgatggcctttaccagggtctcagtacagccaccaaggacacctacgacgcccttcacatgcaggccctgccccctcgctctagaggatctggagcaacaaacttctcactactcaaacaagcaggtgacgtggaggagaatcccgggcctgggatccgggactacaaggacgacgatgacaaggcgcactttccgggctttggacagtcactcctgtacggctatcccgtctatgtattcggtgattgtgtgcaagccgattggtgtccagtgtccggtggtctgtgcagtacacggcttcaccggcacgccctgctggcaacttgccccgaacaccagcttacatgggacccaatcgacggtcgcgtagtgtcttctcccctccagtatctgattcctagattgccttcctttccaacacagaggaccagccggaccctgaaggttctgaccccaccgactacaccagtgtcccccaaagtgcctcccgccttcttccaaagtatgagaaaacatactccctataggaatggctgcttggagccaaccctcggtgaccaactcccctcactcgccttccccgaacctggcctgcgcccacagaacatctatactacttggggcaagactgtggtatgcctttacctgtaccagctgagtcccccgatgacatggcccctcatcccccacgtcattttctgtcacccacggcagctgggagcgttccttaccaaagttccgctcaaacgcctggaggaactgctgtataagatgtttctgcacactggtgccgtgatcgtgctgcccgaggacgatctgcccaccacaatgttccagccggtgcgggctccttgcatccagactgcttggtgcacaggccttctgccttaccactccatactcacaacccctggtctgatctggaccttcaatgacggaagccctatgatttcaggaccttgtcccaaggctggacagccatctctggttgtgcagtcatctctgctcatcttcgagaaattccaaaccaaggcctttcatccatcctacctcctctcccatcagctgatacagtacagctccttccacaacttgcacctgctctttgatgaatatacgaatattccagtcagcagaagcttcaacaagggcgaggccgatgataatggcgaccagccgcctgagcctgccgcacagggtgaaagctccacacagaaggtgcggccctcccatactaacaatccaaagactagtggctccggcgagggcagaggaagtctactaacctgcggagatgtggaagaaaatcctggcccacatatgaccgagtacaagcccacggtgcgcctcgccacccgcgacgacgtccccagggccgtacgcaccctcgccgccgcgttcgccgactaccccgccacgcgccacaccgtcgatccggaccgccacatcgagcgggtcaccgagctgcaagaactcttcctcacgcgcgtcgggctcgacatcggcaaggtgtgggtcgcggacgacggcgccgcggtggcggtctggaccacgccggagagcgtcgaagcgggggcggtgttcgccgagatcggcccgcgcatggccgagttgagcggttcccggctggccgcgcagcaacagatggaaggcctcctggcgccgcaccggcccaaggagcccgcgtggttcctggccaccgtcggcgtctcgcccgaccaccagggcaagggtctgggcagcgccgtcgtgctccccggagtggaggcggccgagcgcgccggggtgcccgccttcctggagacctccgcgccccgcaacctccccttctacgagcggctcggcttcaccgtcaccgccgacgtcgaggtgcccgaaggaccgcgcacctggtgcatgacccgcaagcccggtgcctga

SEQ ID NO: 1753 - DNA, 2889 bp, Artificial Sequence
  Synthetic Polynucleotides
atggccttaccagtgaccgccttgctcctgccgctggccttgctgctccacgccgccaggccggacatccagatgacacagactacatcctccctgtctgcctctctgggagacagagtcaccatcagttgcagggcaagtcaggacattagtaaatatttaaattggtatcagcagaaaccagatggaactgttaaactcctgatctaccatacatcaagattacactcaggagtcccatcaaggttcagtggcagtgggtctggaacagattattctctcaccattagcaacctggagcaagaagatattgccacttacttttgccaacagggtaatacgcttccgtacacgttcggaggggggaccaagctggagatcacaggtggcggtggctcgggcggtggtgggtcgggtggcggcggatctgaggtgaaactgcaggagtcaggacctggcctggtggcgccctcacagagcctgtccgtcacatgcactgtctcaggggtctcattacccgactatggtgtaagctggattcgccagcctccacgaaagggtctggagtggctgggagtaatatggggtagtgaaaccacatactataattcagctctcaaatccagactgaccatcatcaaggacaactccaagagccaagttttcttaaaaatgaacagtctgcaaactgatgacacagccatttactactgtgccaaacattattactacggtggtagctatgctatggactactggggtcaaggaacctcagtcaccgtctcctcacgcgtagagcagaaactgatctcggaagaggatctggcgaagcccaccacgacgccagcgccgcgaccaccaacaccggcgcccaccatcgcgtcgcagcccctgtccctgcgcccagaggcgtgccggccagcggcggggggcgcagtgcacacgagggggctggacttcgcctgtgacatctacatctgggcgcccttggccgggacttgtggggtccttctcctgtcactggttatcaccctttactgcaaacggggcagaaagaaactcctgtatatattcaaacaaccatttatgagaccagtacaaactactcaagaggaagatggctgtagctgccgatttccagaagaagaagaaggaggatgtgaactgagagtgaagttcagcaggagcgcagacgcccccgcgtaccagcagggccagaaccagctctataacgagctgaatctaggacgaagagaggagtacgatgttttggacaagagacgtggccgggaccctgagatggggggaaagccgagaaggaagaaccctcaggaaggcctgtacaatgaactgcagaaagataagatggcggaggcctacagtgagattgggatgaaaggcgagcgccggaggggcaaggggcacgatggcctttaccagggtctcagtacagccaccaaggacacctacgacgcccttcacatgcaggccctgccccctcgctctagaggatctggagcaacaaacttctcactactcaaacaagcaggtgacgtggaggagaatcccgggcctgggatctccaccatgtctgctgaagtcatccatcaggttgaagaagcacttgatacagatgagaaggagatgctgctctttttgtgccgggatgttgctatagatgtggttccacctaatgtcagggaccttctggatattttacgggaaagaggtaagctgtctgtcggggacttggctgaactgctctacagagtgaggcgatttgacctgctcaaacgtatcttgaagatggacagaaaagctgtggagacccacctgctcaggaaccctcaccttgtttcggactatagagtgctgatggcagagattggtgaggatttggataaatctgatgtgtcctcattaattttcctcatgaaggattacatgggccgaggcaagataagcaaggagaagagtttcttggaccttgtggttgagttggagaaactaaatctggttgccccagatcaactggatttattagaaaaatgcctaaagaacatccacagaatagacctgaagacaaaaatccagaagtacaagcagtctgttcaaggagcagggacaagttacaggaatgttctccaagcagcaatccaaaagagtctcaaggatctcgagaccgatttctacgactacaaggacgacgatgacaagactagtggctccggcgagggcagaggaagtctactaacctgcggagatgtggaagaaaatcctggcccacatatgaccgagtacaagcccacggtgcgcctcgccacccgcgacgacgtccccagggccgtacgcaccctcgccgccgcgttcgccgactaccccgccacgcgccacaccgtcgatccggaccgccacatcgagcgggtcaccgagctgcaagaactcttcctcacgcgcgtcgggctcgacatcggcaaggtgtgggtcgcggacgacggcgccgcggtggcggtctggaccacgccggagagcgtcgaagcgggggcggtgttcgccgagatcggcccgcgcatggccgagttgagcggttcccggctggccgcgcagcaacagatggaaggcctcctggcgccgcaccggcccaaggagcccgcgtggttcctggccaccgtcggcgtctcgcccgaccaccagggcaagggtctgggcagcgccgtcgtgctccccggagtggaggcggccgagcgcgccggggtgcccgccttcctggagacctccgcgccccgcaacctccccttctacgagcggctcggcttcaccgtcaccgccgacgtcgaggtgcccgaaggaccgcgcacctggtgcatgacccgcaagcccggtgcctga

SEQ ID NO: 1754 - DNA, 3741 bp, Artificial Sequence
  Synthetic Polynucleotides
atggccttaccagtgaccgccttgctcctgccgctggccttgctgctccacgccgccaggccggacatccagatgacacagactacatcctccctgtctgcctctctgggagacagagtcaccatcagttgcagggcaagtcaggacattagtaaatatttaaattggtatcagcagaaaccagatggaactgttaaactcctgatctaccatacatcaagattacactcaggagtcccatcaaggttcagtggcagtgggtctggaacagattattctctcaccattagcaacctggagcaagaagatattgccacttacttttgccaacagggtaatacgcttccgtacacgttcggaggggggaccaagctggagatcacaggtggcggtggctcgggcggtggtgggtcgggtggcggcggatctgaggtgaaactgcaggagtcaggacctggcctggtggcgccctcacagagcctgtccgtcacatgcactgtctcaggggtctcattacccgactatggtgtaagctggattcgccagcctccacgaaagggtctggagtggctgggagtaatatggggtagtgaaaccacatactataattcagctctcaaatccagactgaccatcatcaaggacaactccaagagccaagttttcttaaaaatgaacagtctgcaaactgatgacacagccatttactactgtgccaaacattattactacggtggtagctatgctatggactactggggtcaaggaacctcagtcaccgtctcctcacgcgtagagcagaaactgatctcggaagaggatctggcgaagcccaccacgacgccagcgccgcgaccaccaacaccggcgcccaccatcgcgtcgcagcccctgtccctgcgcccagaggcgtgccggccagcggcggggggcgcagtgcacacgagggggctggacttcgcctgtgacatctacatctgggcgcccttggccgggacttgtggggtccttctcctgtcactggttatcaccctttactgcaaacggggcagaaagaaactcctgtatatattcaaacaaccatttatgagaccagtacaaactactcaagaggaagatggctgtagctgccgatttccagaagaagaagaaggaggatgtgaactgagagtgaagttcagcaggagcgcagacgcccccgcgtaccagcagggccagaaccagctctataacgagctgaatctaggacgaagagaggagtacgatgttttggacaagagacgtggccgggaccctgagatggggggaaagccgagaaggaagaaccctcaggaaggcctgtacaatgaactgcagaaagataagatggcggaggcctacagtgagattgggatgaaaggcgagcgccggaggggcaaggggcacgatggcctttaccagggtctcagtacagccaccaaggacacctacgacgcccttcacatgcaggccctgccccctcgctctagaggatctggagcaacaaacttctcactactcaaacaagcaggtgacgtggaggagaatcccgggcctgggatctccaccatgtctgctgaagtcatccatcaggttgaagaagcacttgatacagatgagaaggagatgctgctctttttgtgccgggatgttgctatagatgtggttccacctaatgtcagggaccttctggatattttacgggaaagaggtaagctgtctgtcggggacttggctgaactgctctacagagtgaggcgatttgacctgctcaaacgtatcttgaagatggacagaaaagctgtggagacccacctgctcaggaaccctcaccttgtttcggactatagagtgctgatggcagagattggtgaggatttggataaatctgatgtgtcctcattaattttcctcatgaaggattacatgggccgaggcaagataagcaaggagaagagtttcttggaccttgtggttgagttggagaaactaaatctggttgccccagatcaactggatttattagaaaaatgcctaaagaacatccacagaatagacctgaagacaaaaatccagaagtacaagcagtctgttcaaggagcagggacaagttacaggaatgttctccaagcagcaatccaaaagagtctcaaggatccttcaaataacttcaggctccataatgggagaagtaaagaacaaagacttaaggaacagcttggcgctcaacaagaaccagtgaagaaatccattcaggaatcagaagcttttttgcctcagagcatacctgaagagagatacaagatgaagagcaagcccctaggaatctgcctgataatcgattgcattggcaatgagacagagcttcttcgagacaccttcacttccctgggctatgaagtccagaaattcttgcatctcagtatgcatggtatatcccagattcttggccaatttgcctgtatgcccgagcaccgagactacgacagctttgtgtgtgtcctggtgagccgaggaggctcccagagtgtgtatggtgtggatcagactcactcagggctccccctgcatcacatcaggaggatgttcatgggagattcatgcccttatctagcagggaagccaaagatgttttttattcagaactatgtggtgtcagagggccagctggaggacagcagcctcttggaggtggatgggccagcgatgaagaatgtggaattcaaggctcagaagcgagggctgtgcacagttcaccgagaagctgacttcttctggagcctgtgtactgcggacatgtccctgctggagcagtctcacagctcaccatccctgtacctgcagtgcctctcccagaaactgagacaagaaagaaaacgcccactcctggatcttcacattgaactcaatggctacatgtatgattggaacagcagagtttctgccaaggagaaatattatgtctggctgcagcacactctgagaaagaaacttatcctctcctacacactcgagaccgatttctacgactacaaggacgacgatgacaagactagtggctccggcgagggcagaggaagtctactaacctgcggagatgtggaagaaaatcctggcccacatatgaccgagtacaagcccacggtgcgcctcgccacccgcgacgacgtccccagggccgtacgcaccctcgccgccgcgttcgccgactaccccgccacgcgccacaccgtcgatccggaccgccacatcgagcgggtcaccgagctgcaagaactcttcctcacgcgcgtcgggctcgacatcggcaaggtgtgggtcgcggacgacggcgccgcggtggcggtctggaccacgccggagagcgtcgaagcgggggcggtgttcgccgagatcggcccgcgcatggccgagttgagcggttcccggctggccgcgcagcaacagatggaaggcctcctggcgccgcaccggcccaaggagcccgcgtggttcctggccaccgtcggcgtctcgcccgaccaccagggcaagggtctgggcagcgccgtcgtgctccccggagtggaggcggccgagcgcgccggggtgcccgccttcctggagacctccgcgccccgcaacctccccttctacgagcggctcggcttcaccgtcaccgccgacgtcgaggtgcccgaaggaccgcgcacctggtgcatgacccgcaagcccggtgcctga

SEQ ID NO: 1755 - DNA, 3201 bp, Artificial Sequence
  Synthetic Polynucleotides
atggccttaccagtgaccgccttgctcctgccgctggccttgctgctccacgccgccaggccggacatccagatgacacagactacatcctccctgtctgcctctctgggagacagagtcaccatcagttgcagggcaagtcaggacattagtaaatatttaaattggtatcagcagaaaccagatggaactgttaaactcctgatctaccatacatcaagattacactcaggagtcccatcaaggttcagtggcagtgggtctggaacagattattctctcaccattagcaacctggagcaagaagatattgccacttacttttgccaacagggtaatacgcttccgtacacgttcggaggggggaccaagctggagatcacaggtggcggtggctcgggcggtggtgggtcgggtggcggcggatctgaggtgaaactgcaggagtcaggacctggcctggtggcgccctcacagagcctgtccgtcacatgcactgtctcaggggtctcattacccgactatggtgtaagctggattcgccagcctccacgaaagggtctggagtggctgggagtaatatggggtagtgaaaccacatactataattcagctctcaaatccagactgaccatcatcaaggacaactccaagagccaagttttcttaaaaatgaacagtctgcaaactgatgacacagccatttactactgtgccaaacattattactacggtggtagctatgctatggactactggggtcaaggaacctcagtcaccgtctcctcacgcgtagagcagaaactgatctcggaagaggatctggcgaagcccaccacgacgccagcgccgcgaccaccaacaccggcgcccaccatcgcgtcgcagcccctgtccctgcgcccagaggcgtgccggccagcggcggggggcgcagtgcacacgagggggctggacttcgcctgtgacatctacatctgggcgcccttggccgggacttgtggggtccttctcctgtcactggttatcaccctttactgcgggcgcgccagagtgaagttcagcaggagcgcagacgcccccgcgtaccagcagggccagaaccagctctataacgagctgaatctaggacgaagagaggagtacgatgttttggacaagagacgtggccgggaccctgagatggggggaaagccgagaaggaagaaccctcaggaaggcctgtacaatgaactgcagaaagataagatggcggaggcctacagtgagattgggatgaaaggcgagcgccggaggggcaaggggcacgatggcctttaccagggtctcagtacagccaccaaggacacctacgacgcccttcacatgcaggccctgccccctcgctctagaggatctggagcaacaaacttctcactactcaaacaagcaggtgacgtggaggagaatcccgggcctgggatcaccatgactagaggagtgcaggtggagactatctccccaggagacgggcgcaccttccccaagcgcggccagacctgcgtggtgcactacaccgggatgcttgaagatggaaagaaagttgattcctcccgggacagaaacaagccctttaagtttatgctaggcaagcaggaggtgatccgaggctgggaagaaggggttgcccagatgagtgtgggtcagagagccaaactgactatatctccagattatgcctatggtgccactgggcacccaggcatcatcccaccacatgccactctcgtcttcgatgtggagcttctaaaactggaagggatccacatggccacttacgaggttctctgtgaggtggcgcggaaactgggcacggatgacagggaagtggtattgttcctcctaaacgtgttcatacctcaacccacactggcccaattaattggagctcttagagctttaaaggaggagggcaggttaacgtttcccctgttagcggaatgtctgtttcgtgcaggtcgcagagacctcttgcgcgacctgcttcacttagacccgcgttttttagagcgccacctagcgggcacaatgagttatttcagcccttatcagctcactgttctccacgtagacggggagctgtgtgcgagggatattaggtctttgatatttttaagcaaggacactatagggtctcgcagcacaccacagacattcttacactgggtgtactgtatggaaaacttagacctactgggtcccactgacgtggatgccctaatgtcaatgcttagatctttgtcaagagtagacctacagcgccaagtgcaaaccctaatgggccttcacctttccggcccatcacactcccaacactatcgccatacaccactcgagaccgatttctacgactacaaggacgacgatgacaagactagtggctccggcgagggcagaggaagtctactaacctgcggagatgtggaagaaaatcctggcccaatggtgagcaagggcgaggagctgttcaccggggtggtgcccatcctggtcgagctggacggcgacgtaaacggccacaagttcagcgtgtccggcgagggcgagggcgatgccacctacggcaagctgaccctgaagttcatctgcaccaccggcaagctgcccgtgccctggcccaccctcgtgaccaccctgacctacggcgtgcagtgcttcagccgctaccccgaccacatgaagcagcacgacttcttcaagtccgccatgcccgaaggctacgtccaggagcgcaccatcttcttcaaggacgacggcaactacaagacccgcgccgaggtgaagttcgagggcgacaccctggtgaaccgcatcgagctgaagggcatcgacttcaaggaggacggcaacatcctggggcacaagctggagtacaactacaacagccacaacgtctatatcatggccgacaagcagaagaacggcatcaaggtgaacttcaagatccgccacaacatcgaggacggcagcgtgcagctcgccgaccactaccagcagaacacccccatcggcgacggccccgtgctgctgcccgacaaccactacctgagcacccagtccgccctgagcaaagaccccaacgagaagcgcgatcacatggtcctgctggagttcgtgaccgccgccgggatcactctcggcatggacgagctgtacaagtaa

SEQ ID NO: 1756 - DNA, 3522 bp, Artificial Sequence
  Synthetic Polynucleotides
atggccttaccagtgaccgccttgctcctgccgctggccttgctgctccacgccgccaggccggacatccagatgacacagactacatcctccctgtctgcctctctgggagacagagtcaccatcagttgcagggcaagtcaggacattagtaaatatttaaattggtatcagcagaaaccagatggaactgttaaactcctgatctaccatacatcaagattacactcaggagtcccatcaaggttcagtggcagtgggtctggaacagattattctctcaccattagcaacctggagcaagaagatattgccacttacttttgccaacagggtaatacgcttccgtacacgttcggaggggggaccaagctggagatcacaggtggcggtggctcgggcggtggtgggtcgggtggcggcggatctgaggtgaaactgcaggagtcaggacctggcctggtggcgccctcacagagcctgtccgtcacatgcactgtctcaggggtctcattacccgactatggtgtaagctggattcgccagcctccacgaaagggtctggagtggctgggagtaatatggggtagtgaaaccacatactataattcagctctcaaatccagactgaccatcatcaaggacaactccaagagccaagttttcttaaaaatgaacagtctgcaaactgatgacacagccatttactactgtgccaaacattattactacggtggtagctatgctatggactactggggtcaaggaacctcagtcaccgtctcctcacgcgtagagcagaaactgatctcggaagaggatctggcgaagcccaccacgacgccagcgccgcgaccaccaacaccggcgcccaccatcgcgtcgcagcccctgtccctgcgcccagaggcgtgccggccagcggcggggggcgcagtgcacacgagggggctggacttcgcctgtgacatctacatctgggcgcccttggccgggacttgtggggtccttctcctgtcactggttatcaccctttactgcgggcgcgccagagtgaagttcagcaggagcgcagacgcccccgcgtaccagcagggccagaaccagctctataacgagctgaatctaggacgaagagaggagtacgatgttttggacaagagacgtggccgggaccctgagatggggggaaagccgagaaggaagaaccctcaggaaggcctgtacaatgaactgcagaaagataagatggcggaggcctacagtgagattgggatgaaaggcgagcgccggaggggcaaggggcacgatggcctttaccagggtctcagtacagccaccaaggacacctacgacgcccttcacatgcaggccctgccccctcgctctagaggatctggagcaacaaacttctcactactcaaacaagcaggtgacgtggaggagaatcccgggcctgggatcaccatgggcgtccaagtcgaaaccattagtcccggcgatggcagaacatttcctaaaaggggacaaacatgtgtcgtccattatacaggcatgttggaggacggcaaaaaggtggacagtagtagagatcgcaataaacctttcaaattcatgttgggaaaacaagaagtcattaggggatgggaggagggcgtggctcaaatgtccgtcggccaacgcgctaagctcaccatcagccccgactacgcatacggcgctaccggacatcccggaattattccccctcacgctaccttggtgtttgacgtcgaactgttgaagctcgggactagaggagtgcaggtggagactatctccccaggagacgggcgcaccttccccaagcgcggccagacctgcgtggtgcactacaccgggatgcttgaagatggaaagaaagttgattcctcccgggacagaaacaagccctttaagtttatgctaggcaagcaggaggtgatccgaggctgggaagaaggggttgcccagatgagtgtgggtcagagagccaaactgactatatctccagattatgcctatggtgccactgggcacccaggcatcatcccaccacatgccactctcgtcttcgatgtggagcttctaaaactggaagggatccacatggccacttacgaggttctctgtgaggtggcgcggaaactgggcacggatgacagggaagtggtattgttcctcctaaacgtgttcatacctcaacccacactggcccaattaattggagctcttagagctttaaaggaggagggcaggttaacgtttcccctgttagcggaatgtctgtttcgtgcaggtcgcagagacctcttgcgcgacctgcttcacttagacccgcgttttttagagcgccacctagcgggcacaatgagttatttcagcccttatcagctcactgttctccacgtagacggggagctgtgtgcgagggatattaggtctttgatatttttaagcaaggacactatagggtctcgcagcacaccacagacattcttacactgggtgtactgtatggaaaacttagacctactgggtcccactgacgtggatgccctaatgtcaatgcttagatctttgtcaagagtagacctacagcgccaagtgcaaaccctaatgggccttcacctttccggcccatcacactcccaacactatcgccatacaccactcgagaccgatttctacgactacaaggacgacgatgacaagactagtggctccggcgagggcagaggaagtctactaacctgcggagatgtggaagaaaatcctggcccaatggtgagcaagggcgaggagctgttcaccggggtggtgcccatcctggtcgagctggacggcgacgtaaacggccacaagttcagcgtgtccggcgagggcgagggcgatgccacctacggcaagctgaccctgaagttcatctgcaccaccggcaagctgcccgtgccctggcccaccctcgtgaccaccctgacctacggcgtgcagtgcttcagccgctaccccgaccacatgaagcagcacgacttcttcaagtccgccatgcccgaaggctacgtccaggagcgcaccatcttcttcaaggacgacggcaactacaagacccgcgccgaggtgaagttcgagggcgacaccctggtgaaccgcatcgagctgaagggcatcgacttcaaggaggacggcaacatcctggggcacaagctggagtacaactacaacagccacaacgtctatatcatggccgacaagcagaagaacggcatcaaggtgaacttcaagatccgccacaacatcgaggacggcagcgtgcagctcgccgaccactaccagcagaacacccccatcggcgacggccccgtgctgctgcccgacaaccactacctgagcacccagtccgccctgagcaaagaccccaacgagaagcgcgatcacatggtcctgctggagttcgtgaccgccgccgggatcactctcggcatggacgagctgtacaagtaa

SEQ ID NO: 1757 - DNA, 3555 bp, Artificial Sequence
  Synthetic Polynucleotides
atggccttaccagtgaccgccttgctcctgccgctggccttgctgctccacgccgccaggccggacatccagatgacacagactacatcctccctgtctgcctctctgggagacagagtcaccatcagttgcagggcaagtcaggacattagtaaatatttaaattggtatcagcagaaaccagatggaactgttaaactcctgatctaccatacatcaagattacactcaggagtcccatcaaggttcagtggcagtgggtctggaacagattattctctcaccattagcaacctggagcaagaagatattgccacttacttttgccaacagggtaatacgcttccgtacacgttcggaggggggaccaagctggagatcacaggtggcggtggctcgggcggtggtgggtcgggtggcggcggatctgaggtgaaactgcaggagtcaggacctggcctggtggcgccctcacagagcctgtccgtcacatgcactgtctcaggggtctcattacccgactatggtgtaagctggattcgccagcctccacgaaagggtctggagtggctgggagtaatatggggtagtgaaaccacatactataattcagctctcaaatccagactgaccatcatcaaggacaactccaagagccaagttttcttaaaaatgaacagtctgcaaactgatgacacagccatttactactgtgccaaacattattactacggtggtagctatgctatggactactggggtcaaggaacctcagtcaccgtctcctcacgcgtagagcagaaactgatctcggaagaggatctggcgaagcccaccacgacgccagcgccgcgaccaccaacaccggcgcccaccatcgcgtcgcagcccctgtccctgcgcccagaggcgtgccggccagcggcggggggcgcagtgcacacgagggggctggacttcgcctgtgacatctacatctgggcgcccttggccgggacttgtggggtccttctcctgtcactggttatcaccctttactgcgggcgcgccagagtgaagttcagcaggagcgcagacgcccccgcgtaccagcagggccagaaccagctctataacgagctgaatctaggacgaagagaggagtacgatgttttggacaagagacgtggccgggaccctgagatggggggaaagccgagaaggaagaaccctcaggaaggcctgtacaatgaactgcagaaagataagatggcggaggcctacagtgagattgggatgaaaggcgagcgccggaggggcaaggggcacgatggcctttaccagggtctcagtacagccaccaaggacacctacgacgcccttcacatgcaggccctgccccctcgctctagaggatctggagcaacaaacttctcactactcaaacaagcaggtgacgtggaggagaatcccgggcctgggatcaccatggggagtagcaagagcaagcctaaggaccccagccagcgcggcgtccaagtcgaaaccattagtcccggcgatggcagaacatttcctaaaaggggacaaacatgtgtcgtccattatacaggcatgttggaggacggcaaaaaggtggacagtagtagagatcgcaataaacctttcaaattcatgttgggaaaacaagaagtcattaggggatgggaggagggcgtggctcaaatgtccgtcggccaacgcgctaagctcaccatcagccccgactacgcatacggcgctaccggacatcccggaattattccccctcacgctaccttggtgtttgacgtcgaactgttgaagctcgggactagaggagtgcaggtggagactatctccccaggagacgggcgcaccttccccaagcgcggccagacctgcgtggtgcactacaccgggatgcttgaagatggaaagaaagttgattcctcccgggacagaaacaagccctttaagtttatgctaggcaagcaggaggtgatccgaggctgggaagaaggggttgcccagatgagtgtgggtcagagagccaaactgactatatctccagattatgcctatggtgccactgggcacccaggcatcatcccaccacatgccactctcgtcttcgatgtggagcttctaaaactggaaactagtgccacttacgaggttctctgtgaggtggcgcggaaactgggcacggatgacagggaagtggtattgttcctcctaaacgtgttcatacctcaacccacactggcccaattaattggagctcttagagctttaaaggaggagggcaggttaacgtttcccctgttagcggaatgtctgtttcgtgcaggtcgcagagacctcttgcgcgacctgcttcacttagacccgcgttttttagagcgccacctagcgggcacaatgagttatttcagcccttatcagctcactgttctccacgtagacggggagctgtgtgcgagggatattaggtctttgatatttttaagcaaggacactatagggtctcgcagcacaccacagacattcttacactgggtgtactgtatggaaaacttagacctactgggtcccactgacgtggatgccctaatgtcaatgcttagatctttgtcaagagtagacctacagcgccaagtgcaaaccctaatgggccttcacctttccggcccatcacactcccaacactatcgccatacaccactcgagaccgatttctacgactacaaggacgacgatgacaagactagtggctccggcgagggcagaggaagtctactaacctgcggagatgtggaagaaaatcctggcccaatggtgagcaagggcgaggagctgttcaccggggtggtgcccatcctggtcgagctggacggcgacgtaaacggccacaagttcagcgtgtccggcgagggcgagggcgatgccacctacggcaagctgaccctgaagttcatctgcaccaccggcaagctgcccgtgccctggcccaccctcgtgaccaccctgacctacggcgtgcagtgcttcagccgctaccccgaccacatgaagcagcacgacttcttcaagtccgccatgcccgaaggctacgtccaggagcgcaccatcttcttcaaggacgacggcaactacaagacccgcgccgaggtgaagttcgagggcgacaccctggtgaaccgcatcgagctgaagggcatcgacttcaaggaggacggcaacatcctggggcacaagctggagtacaactacaacagccacaacgtctatatcatggccgacaagcagaagaacggcatcaaggtgaacttcaagatccgccacaacatcgaggacggcagcgtgcagctcgccgaccactaccagcagaacacccccatcggcgacggccccgtgctgctgcccgacaaccactacctgagcacccagtccgccctgagcaaagaccccaacgagaagcgcgatcacatggtcctgctggagttcgtgaccgccgccgggatcactctcggcatggacgagctgtacaagtaa

SEQ ID NO: 1758 - DNA, 4101 bp, Artificial Sequence
  Synthetic Polynucleotide
atggccttaccagtgaccgccttgctcctgccgctggccttgctgctccacgccgccaggccggacatccagatgacacagactacatcctccctgtctgcctctctgggagacagagtcaccatcagttgcagggcaagtcaggacattagtaaatatttaaattggtatcagcagaaaccagatggaactgttaaactcctgatctaccatacatcaagattacactcaggagtcccatcaaggttcagtggcagtgggtctggaacagattattctctcaccattagcaacctggagcaagaagatattgccacttacttttgccaacagggtaatacgcttccgtacacgttcggaggggggaccaagctggagatcacaggtggcggtggctcgggcggtggtgggtcgggtggcggcggatctgaggtgaaactgcaggagtcaggacctggcctggtggcgccctcacagagcctgtccgtcacatgcactgtctcaggggtctcattacccgactatggtgtaagctggattcgccagcctccacgaaagggtctggagtggctgggagtaatatggggtagtgaaaccacatactataattcagctctcaaatccagactgaccatcatcaaggacaactccaagagccaagttttcttaaaaatgaacagtctgcaaactgatgacacagccatttactactgtgccaaacattattactacggtggtagctatgctatggactactggggtcaaggaacctcagtcaccgtctcctcacgcgtagagcagaaactgatctcggaagaggatctggcgaagcccaccacgacgccagcgccgcgaccaccaacaccggcgcccaccatcgcgtcgcagcccctgtccctgcgcccagaggcgtgccggccagcggcggggggcgcagtgcacacgagggggctggacttcgcctgtgacatctacatctgggcgcccttggccgggacttgtggggtccttctcctgtcactggttatcaccctttactgcaaacggggcagaaagaaactcctgtatatattcaaacaaccatttatgagaccagtacaaactactcaagaggaagatggctgtagctgccgatttccagaagaagaagaaggaggatgtgaactgagagtgaagttcagcaggagcgcagacgcccccgcgtaccagcagggccagaaccagctctataacgagctgaatctaggacgaagagaggagtacgatgttttggacaagagacgtggccgggaccctgagatggggggaaagccgagaaggaagaaccctcaggaaggcctgtacaatgaactgcagaaagataagatggcggaggcctacagtgagattgggatgaaaggcgagcgccggaggggcaaggggcacgatggcctttaccagggtctcagtacagccaccaaggacacctacgacgcccttcacatgcaggccctgccccctcgctctagaggatctggagcaacaaacttctcactactcaaacaagcaggtgacgtggaggagaatcccgggcctgggatcaccatgggcgtccaagtcgaaaccattagtcccggcgatggcagaacatttcctaaaaggggacaaacatgtgtcgtccattatacaggcatgttggaggacggcaaaaaggtggacagtagtagagatcgcaataaacctttcaaattcatgttgggaaaacaagaagtcattaggggatgggaggagggcgtggctcaaatgtccgtcggccaacgcgctaagctcaccatcagccccgactacgcatacggcgctaccggacatcccggaattattccccctcacgctaccttggtgtttgacgtcgaactgttgaagctcgggactagaggagtgcaggtggagactatctccccaggagacgggcgcaccttccccaagcgcggccagacctgcgtggtgcactacaccgggatgcttgaagatggaaagaaagttgattcctcccgggacagaaacaagccctttaagtttatgctaggcaagcaggaggtgatccgaggctgggaagaaggggttgcccagatgagtgtgggtcagagagccaaactgactatatctccagattatgcctatggtgccactgggcacccaggcatcatcccaccacatgccactctcgtcttcgatgtggagcttctaaaactggaagggatccacatggcgcactttccgggctttggacagtcactcctgtacggctatcccgtctatgtattcggtgattgtgtgcaagccgattggtgtccagtgtccggtggtctgtgcagtacacggcttcaccggcacgccctgctggcaacttgccccgaacaccagcttacatgggacccaatcgacggtcgcgtagtgtcttctcccctccagtatctgattcctagattgccttcctttccaacacagaggaccagccggaccctgaaggttctgaccccaccgactacaccagtgtcccccaaagtgcctcccgccttcttccaaagtatgagaaaacatactccctataggaatggctgcttggagccaaccctcggtgaccaactcccctcactcgccttccccgaacctggcctgcgcccacagaacatctatactacttggggcaagactgtggtatgcctttacctgtaccagctgagtcccccgatgacatggcccctcatcccccacgtcattttctgtcacccacggcagctgggagcgttccttaccaaagttccgctcaaacgcctggaggaactgctgtataagatgtttctgcacactggtgccgtgatcgtgctgcccgaggacgatctgcccaccacaatgttccagccggtgcgggctccttgcatccagactgcttggtgcacaggccttctgccttaccactccatactcacaacccctggtctgatctggaccttcaatgacggaagccctatgatttcaggaccttgtcccaaggctggacagccatctctggttgtgcagtcatctctgctcatcttcgagaaattccaaaccaaggcctttcatccatcctacctcctctcccatcagctgatacagtacagctccttccacaacttgcacctgctctttgatgaatatacgaatattccagtcagcagaagcttcaacaagggcgaggccgatgataatggcgaccagccgcctgagcctgccgcacagggtgaaagctccacacagaaggtgcggccctcccatactaacaatccaaagactagtggctccggcgagggcagaggaagtctactaacctgcggagatgtggaagaaaatcctggcccaatggtgagcaagggcgaggagctgttcaccggggtggtgcccatcctggtcgagctggacggcgacgtaaacggccacaagttcagcgtgtccggcgagggcgagggcgatgccacctacggcaagctgaccctgaagttcatctgcaccaccggcaagctgcccgtgccctggcccaccctcgtgaccaccctgacctacggcgtgcagtgcttcagccgctaccccgaccacatgaagcagcacgacttcttcaagtccgccatgcccgaaggctacgtccaggagcgcaccatcttcttcaaggacgacggcaactacaagacccgcgccgaggtgaagttcgagggcgacaccctggtgaaccgcatcgagctgaagggcatcgacttcaaggaggacggcaacatcctggggcacaagctggagtacaactacaacagccacaacgtctatatcatggccgacaagcagaagaacggcatcaaggtgaacttcaagatccgccacaacatcgaggacggcagcgtgcagctcgccgaccactaccagcagaacacccccatcggcgacggccccgtgctgctgcccgacaaccactacctgagcacccagtccgccctgagcaaagaccccaacgagaagcgcgatcacatggtcctgctggagttcgtgaccgccgccgggatcactctcggcatggacgagctgtacaagtaa

SEQ ID NO: 1759 - DNA, 2844 bp, Artificial Sequence
  Synthetic Polynucleotides
atggccttaccagtgaccgccttgctcctgccgctggccttgctgctccacgccgccaggccggacatccagatgacacagactacatcctccctgtctgcctctctgggagacagagtcaccatcagttgcagggcaagtcaggacattagtaaatatttaaattggtatcagcagaaaccagatggaactgttaaactcctgatctaccatacatcaagattacactcaggagtcccatcaaggttcagtggcagtgggtctggaacagattattctctcaccattagcaacctggagcaagaagatattgccacttacttttgccaacagggtaatacgcttccgtacacgttcggaggggggaccaagctggagatcacaggtggcggtggctcgggcggtggtgggtcgggtggcggcggatctgaggtgaaactgcaggagtcaggacctggcctggtggcgccctcacagagcctgtccgtcacatgcactgtctcaggggtctcattacccgactatggtgtaagctggattcgccagcctccacgaaagggtctggagtggctgggagtaatatggggtagtgaaaccacatactataattcagctctcaaatccagactgaccatcatcaaggacaactccaagagccaagttttcttaaaaatgaacagtctgcaaactgatgacacagccatttactactgtgccaaacattattactacggtggtagctatgctatggactactggggtcaaggaacctcagtcaccgtctcctcacgcgtagagcagaaactgatctcggaagaggatctgaaaattgaagttatgtatcctcctccttacctagacaatgagaagagcaatggaaccattatccatgtgaaagggaaacacctttgtccaagtcccctatttcccggaccttctaagcccttttgggtgctggtggtggttgggggagtcctggcttgctatagcttgctagtaacagtggcctttattattttctgggtgaggagtaagaggagcaggctcctgcacagtgactacatgaacatgactccacgccgccccggacccacccgcaagcattaccagccctatgccccaccacgcgacttcgcagcctatcgctccagagtgaagttcagcaggagcgcagacgcccccgcgtaccagcagggccagaaccagctctataacgagctcaatctaggacgaagagaggagtacgatgttttggacaagagacgtggccgggaccctgagatggggggaaagccgagaaggaagaaccctcaggaaggcctgtacaatgaactgcagaaagataagatggcggaggcctacagtgagattgggatgaaaggcgagcgccggaggggcaaggggcacgatggcctttaccagggtctcagtacagccaccaaggacacctacgacgcccttcacatgcaggccctgccccctcgctctagaggatctggagcaacaaacttctcactactcaaacaagcaggtgacgtggaggagaatcccgggcctgggatccacatggccacttacgaggttctctgtgaggtggcgcggaaactgggcacggatgacagggaagtggtattgttcctcctaaacgtgttcatacctcaacccacactggcccaattaattggagctcttagagctttaaaggaggagggcaggttaacgtttcccctgttagcggaatgtctgtttcgtgcaggtcgcagagacctcttgcgcgacctgcttcacttagacccgcgttttttagagcgccacctagcgggcacaatgagttatttcagcccttatcagctcactgttctccacgtagacggggagctgtgtgcgagggatattaggtctttgatatttttaagcaaggacactatagggtctcgcagcacaccacagacattcttacactgggtgtactgtatggaaaacttagacctactgggtcccactgacgtggatgccctaatgtcaatgcttagatctttgtcaagagtagacctacagcgccaagtgcaaaccctaatgggccttcacctttccggcccatcacactcccaacactatcgccatacaccactcgagaccgatttctacgactacaaggacgacgatgacaagactagtggctccggcgagggcagaggaagtctactaacctgcggagatgtggaagaaaatcctggcccacatatgaccgagtacaagcccacggtgcgcctcgccacccgcgacgacgtccccagggccgtacgcaccctcgccgccgcgttcgccgactaccccgccacgcgccacaccgtcgatccggaccgccacatcgagcgggtcaccgagctgcaagaactcttcctcacgcgcgtcgggctcgacatcggcaaggtgtgggtcgcggacgacggcgccgcggtggcggtctggaccacgccggagagcgtcgaagcgggggcggtgttcgccgagatcggcccgcgcatggccgagttgagcggttcccggctggccgcgcagcaacagatggaaggcctcctggcgccgcaccggcccaaggagcccgcgtggttcctggccaccgtcggcgtctcgcccgaccaccagggcaagggtctgggcagcgccgtcgtgctccccggagtggaggcggccgagcgcgccggggtgcccgccttcctggagacctccgcgccccgcaacctccccttctacgagcggctcggcttcaccgtcaccgccgacgtcgaggtgcccgaaggaccgcgcacctggtgcatgacccgcaagcccggtgcctga

SEQ ID NO: 1760 - DNA, 3393 bp, Artificial Sequence
  Synthetic Polynucleotides
atggccttaccagtgaccgccttgctcctgccgctggccttgctgctccacgccgccaggccggacatccagatgacacagactacatcctccctgtctgcctctctgggagacagagtcaccatcagttgcagggcaagtcaggacattagtaaatatttaaattggtatcagcagaaaccagatggaactgttaaactcctgatctaccatacatcaagattacactcaggagtcccatcaaggttcagtggcagtgggtctggaacagattattctctcaccattagcaacctggagcaagaagatattgccacttacttttgccaacagggtaatacgcttccgtacacgttcggaggggggaccaagctggagatcacaggtggcggtggctcgggcggtggtgggtcgggtggcggcggatctgaggtgaaactgcaggagtcaggacctggcctggtggcgccctcacagagcctgtccgtcacatgcactgtctcaggggtctcattacccgactatggtgtaagctggattcgccagcctccacgaaagggtctggagtggctgggagtaatatggggtagtgaaaccacatactataattcagctctcaaatccagactgaccatcatcaaggacaactccaagagccaagttttcttaaaaatgaacagtctgcaaactgatgacacagccatttactactgtgccaaacattattactacggtggtagctatgctatggactactggggtcaaggaacctcagtcaccgtctcctcacgcgtagagcagaaactgatctcggaagaggatctgaaaattgaagttatgtatcctcctccttacctagacaatgagaagagcaatggaaccattatccatgtgaaagggaaacacctttgtccaagtcccctatttcccggaccttctaagcccttttgggtgctggtggtggttgggggagtcctggcttgctatagcttgctagtaacagtggcctttattattttctgggtgaggagtaagaggagcaggctcctgcacagtgactacatgaacatgactccacgccgccccggacccacccgcaagcattaccagccctatgccccaccacgcgacttcgcagcctatcgctccagagtgaagttcagcaggagcgcagacgcccccgcgtaccagcagggccagaaccagctctataacgagctcaatctaggacgaagagaggagtacgatgttttggacaagagacgtggccgggaccctgagatggggggaaagccgagaaggaagaaccctcaggaaggcctgtacaatgaactgcagaaagataagatggcggaggcctacagtgagattgggatgaaaggcgagcgccggaggggcaaggggcacgatggcctttaccagggtctcagtacagccaccaaggacacctacgacgcccttcacatgcaggccctgccccctcgctctagaggatctggagcaacaaacttctcactactcaaacaagcaggtgacgtggaggagaatcccgggcctgggatccacatggcgcacgagccaatccccttctctttcctgcggaatctgctggcagagctggacgctagcgagcacgaggtcttacggttcctgtgccgcgatgtggcgcctgctagcaagactgcagaagacgctttgcgagcgttgcagagacggcgtctgctgacactatcgagcatggcagaactgctctgtgcgctccggcgctttgacgttctcaaggtccgctttggtatgacgcgcgagtgcgcggggcgcttgctggggcacggtttcctttcgcagtacaggcttcaagttgctgccatcaacaacatggtcgggagcgaagacctacgcgtcatgtgcctttgcgcgggaaagctcttgccgccaagctgcacgccgcgctgccttgtcgatcttgtctccgcgctagaggacgcgggggctatctctccgcaggacgtttctgtcctggtgaccctccttcacgccgtttgcagatacgatctttccgtggcgctgtcggcagtagcacatgggcacatgactgtgggcgtgggaacgccagtacaggacgagcccatggacgtgctcgaagtcgatgacgcggagcccatggaagcgacaccagcgtgcgatgagatcggagttgtcaagctcgcgggcgcggcttccgcgggggcgcctctcgcggacggggcttttgcagcctgtacgagcgcgggcaagggcgaggacctcgcaacatcggatctcacggactccgagcccgaggactctgttttcgcggtcgcggatccggtgtacgcagacgtggacttgtccatgtttgtgcgcgcgaacgctactgcagattcctccatgtttgtgaacgcggacgcgggtgcagactcctcgcttgtgaacgcggacgcgggtgcagattcctcgcttgtgaacgcggacgcgggtgcagactcctcgcttgtgaacgcggtcgcggatgcaaactcctcgttaatgcgcacgacctcggcttgtacggactccgagcccgaggactctgcagggccatcgtgcgcgggcatggccttgtccatgtttgggcgcgcgaaatcggtgtcgtcgcttcttctgcgaacgaaagcttcctacctcgagaccgatttctacgactacaaggacgacgatgacaagactagtggctccggcgagggcagaggaagtctactaacctgcggagatgtggaagaaaatcctggcccacatatgaccgagtacaagcccacggtgcgcctcgccacccgcgacgacgtccccagggccgtacgcaccctcgccgccgcgttcgccgactaccccgccacgcgccacaccgtcgatccggaccgccacatcgagcgggtcaccgagctgcaagaactcttcctcacgcgcgtcgggctcgacatcggcaaggtgtgggtcgcggacgacggcgccgcggtggcggtctggaccacgccggagagcgtcgaagcgggggcggtgttcgccgagatcggcccgcgcatggccgagttgagcggttcccggctggccgcgcagcaacagatggaaggcctcctggcgccgcaccggcccaaggagcccgcgtggttcctggccaccgtcggcgtctcgcccgaccaccagggcaagggtctgggcagcgccgtcgtgctccccggagtggaggcggccgagcgcgccggggtgcccgccttcctggagacctccgcgccccgcaacctccccttctacgagcggctcggcttcaccgtcaccgccgacgtcgaggtgcccgaaggaccgcgcacctggtgcatgacccgcaagcccggtgcctga

SEQ ID NO: 1761 - DNA, 2961 bp, Artificial Sequence
  Synthetic Polynucleotides
atggccttaccagtgaccgccttgctcctgccgctggccttgctgctccacgccgccaggccggacatccagatgacacagactacatcctccctgtctgcctctctgggagacagagtcaccatcagttgcagggcaagtcaggacattagtaaatatttaaattggtatcagcagaaaccagatggaactgttaaactcctgatctaccatacatcaagattacactcaggagtcccatcaaggttcagtggcagtgggtctggaacagattattctctcaccattagcaacctggagcaagaagatattgccacttacttttgccaacagggtaatacgcttccgtacacgttcggaggggggaccaagctggagatcacaggtggcggtggctcgggcggtggtgggtcgggtggcggcggatctgaggtgaaactgcaggagtcaggacctggcctggtggcgccctcacagagcctgtccgtcacatgcactgtctcaggggtctcattacccgactatggtgtaagctggattcgccagcctccacgaaagggtctggagtggctgggagtaatatggggtagtgaaaccacatactataattcagctctcaaatccagactgaccatcatcaaggacaactccaagagccaagttttcttaaaaatgaacagtctgcaaactgatgacacagccatttactactgtgccaaacattattactacggtggtagctatgctatggactactggggtcaaggaacctcagtcaccgtctcctcacgcgtagagcagaaactgatctcggaagaggatctgaaaattgaagttatgtatcctcctccttacctagacaatgagaagagcaatggaaccattatccatgtgaaagggaaacacctttgtccaagtcccctatttcccggaccttctaagcccttttgggtgctggtggtggttgggggagtcctggcttgctatagcttgctagtaacagtggcctttattattttctgggtgaggagtaagaggagcaggctcctgcacagtgactacatgaacatgactccacgccgccccggacccacccgcaagcattaccagccctatgccccaccacgcgacttcgcagcctatcgctccagagtgaagttcagcaggagcgcagacgcccccgcgtaccagcagggccagaaccagctctataacgagctcaatctaggacgaagagaggagtacgatgttttggacaagagacgtggccgggaccctgagatggggggaaagccgagaaggaagaaccctcaggaaggcctgtacaatgaactgcagaaagataagatggcggaggcctacagtgagattgggatgaaaggcgagcgccggaggggcaaggggcacgatggcctttaccagggtctcagtacagccaccaaggacacctacgacgcccttcacatgcaggccctgccccctcgctctagaggatctggagcaacaaacttctcactactcaaacaagcaggtgacgtggaggagaatcccgggcctgggatccacatggccacttacgaggttctctgtgaggtggcgcggaaactgggcacggatgacagggaagtggtattgttcctcctaaacgtgttcatacctcaacccacactggcccaattaattggagctcttagagctttaaaggaggagggcaggttaacgtttcccctgttagcggaatgtctgtttcgtgcaggtcgcagagacctcttgcgcgacctgcttcacttagacccgcgttttttagagcgccacctagcgggcacaatgagttatttcagcccttatcagctcactgttctccacgtagacggggagctgtgtgcgagggatattaggtctttgatatttttaagcaaggacactatagggtctcgcagcacaccacagacattcttacactgggtgtactgtatggaaaacttagacctactgggtcccactgacgtggatgccctaatgtcaatgcttagatctttgtcaagagtagacctacagcgccaagtgcaaaccctaatgggccttcacctttccggcccatcacactcccaacactatcgccatacaccactcgagaccgatttctacgactacaaggacgacgatgacaagactagtggctccggcgagggcagaggaagtctactaacctgcggagatgtggaagaaaatcctggcccaatggtgagcaagggcgaggagctgttcaccggggtggtgcccatcctggtcgagctggacggcgacgtaaacggccacaagttcagcgtgtccggcgagggcgagggcgatgccacctacggcaagctgaccctgaagttcatctgcaccaccggcaagctgcccgtgccctggcccaccctcgtgaccaccctgacctacggcgtgcagtgcttcagccgctaccccgaccacatgaagcagcacgacttcttcaagtccgccatgcccgaaggctacgtccaggagcgcaccatcttcttcaaggacgacggcaactacaagacccgcgccgaggtgaagttcgagggcgacaccctggtgaaccgcatcgagctgaagggcatcgacttcaaggaggacggcaacatcctggggcacaagctggagtacaactacaacagccacaacgtctatatcatggccgacaagcagaagaacggcatcaaggtgaacttcaagatccgccacaacatcgaggacggcagcgtgcagctcgccgaccactaccagcagaacacccccatcggcgacggccccgtgctgctgcccgacaaccactacctgagcacccagtccgccctgagcaaagaccccaacgagaagcgcgatcacatggtcctgctggagttcgtgaccgccgccgggatcactctcggcatggacgagctgtacaagtaa

SEQ ID NO: 1762 - DNA, 3075 bp, Artificial Sequence
  Synthetic Polynucleotides
atggccttaccagtgaccgccttgctcctgccgctggccttgctgctccacgccgccaggccggacatccagatgacacagactacatcctccctgtctgcctctctgggagacagagtcaccatcagttgcagggcaagtcaggacattagtaaatatttaaattggtatcagcagaaaccagatggaactgttaaactcctgatctaccatacatcaagattacactcaggagtcccatcaaggttcagtggcagtgggtctggaacagattattctctcaccattagcaacctggagcaagaagatattgccacttacttttgccaacagggtaatacgcttccgtacacgttcggaggggggaccaagctggagatcacaggtggcggtggctcgggcggtggtgggtcgggtggcggcggatctgaggtgaaactgcaggagtcaggacctggcctggtggcgccctcacagagcctgtccgtcacatgcactgtctcaggggtctcattacccgactatggtgtaagctggattcgccagcctccacgaaagggtctggagtggctgggagtaatatggggtagtgaaaccacatactataattcagctctcaaatccagactgaccatcatcaaggacaactccaagagccaagttttcttaaaaatgaacagtctgcaaactgatgacacagccatttactactgtgccaaacattattactacggtggtagctatgctatggactactggggtcaaggaacctcagtcaccgtctcctcacgcgtagagcagaaactgatctcggaagaggatctggcgaagcccaccacgacgccagcgccgcgaccaccaacaccggcgcccaccatcgcgtcgcagcccctgtccctgcgcccagaggcgtgccggccagcggcggggggcgcagtgcacacgagggggctggacttcgcctgtgacatctacatctgggcgcccttggccgggacttgtggggtccttctcctgtcactggttatcaccctttactgcaaacggggcagaaagaaactcctgtatatattcaaacaaccatttatgagaccagtacaaactactcaagaggaagatggctgtagctgccgatttccagaagaagaagaaggaggatgtgaactgagagtgaagttcagcaggagcgcagacgcccccgcgtaccagcagggccagaaccagctctataacgagctgaatctaggacgaagagaggagtacgatgttttggacaagagacgtggccgggaccctgagatggggggaaagccgagaaggaagaaccctcaggaaggcctgtacaatgaactgcagaaagataagatggcggaggcctacagtgagattgggatgaaaggcgagcgccggaggggcaaggggcacgatggcctttaccagggtctcagtacagccaccaaggacacctacgacgcccttcacatgcaggccctgccccctcgctctagaggatctggagcaacaaacttctcactactcaaacaagcaggtgacgtggaggagaatcccgggcctgggatcctgatggactggatttggcgcatccttttccttgtcggcgctgctaccggcgcgcattctgagattgtactgactcagtctcccgctactctgtccctttcccccggcgaacgcgcgaccctctcatgctcagccagcatctctgtgtcttacatgtattggtatcagcaaaagcctgggcaagcgccaagactgctgatatacgacatgtccaacctggcaagcggcatcccggcgagattctccggatctggctcagggaccgattttacgctcactatcagttccttggagcctgaggatttcgcggtgtattactgtatgcagtggagcggttatccttacacatttggaggcggaactaaagtggagataaagggcggtggcggttcaggtggagggggaagcggtggtggtggctcagaggtgcaactcgtggagtccggtggcggtctggtgcagccaggggggtccttgcgcctgagctgcgccgcttctgggtttacgttttccccattcgctatgtcctgggtccggcaggcgcccggtaaaggtctggaatgggtggcaaagatttccccaggggggtcttggacttattactccgacaccgtgacaggtcgatttaccatcagcagggataacgccaaaaacagcctctacctccagatgaactccttgcgagccgaagataccgccgtctattactgtgccaggcagctgtggggatactacgcgctggacatttgggggcagggaacaactgtgactgtatcctcactcgagaccgatttctacgactacaaggacgacgatgacaagactagtggctccggcgagggcagaggaagtctactaacctgcggagatgtggaagaaaatcctggcccacatatgaccgagtacaagcccacggtgcgcctcgccacccgcgacgacgtccccagggccgtacgcaccctcgccgccgcgttcgccgactaccccgccacgcgccacaccgtcgatccggaccgccacatcgagcgggtcaccgagctgcaagaactcttcctcacgcgcgtcgggctcgacatcggcaaggtgtgggtcgcggacgacggcgccgcggtggcggtctggaccacgccggagagcgtcgaagcgggggcggtgttcgccgagatcggcccgcgcatggccgagttgagcggttcccggctggccgcgcagcaacagatggaaggcctcctggcgccgcaccggcccaaggagcccgcgtggttcctggccaccgtcggcgtctcgcccgaccaccagggcaagggtctgggcagcgccgtcgtgctccccggagtggaggcggccgagcgcgccggggtgcccgccttcctggagacctccgcgccccgcaacctccccttctacgagcggctcggcttcaccgtcaccgccgacgtcgaggtgcccgaaggaccgcgcacctggtgcatgacccgcaagcccggtgcctga

SEQ ID NO: 1763 - DNA, 3078 bp, Artificial Sequence
  Synthetic Polynucleotides
atggccttaccagtgaccgccttgctcctgccgctggccttgctgctccacgccgccaggccggacatccagatgacacagactacatcctccctgtctgcctctctgggagacagagtcaccatcagttgcagggcaagtcaggacattagtaaatatttaaattggtatcagcagaaaccagatggaactgttaaactcctgatctaccatacatcaagattacactcaggagtcccatcaaggttcagtggcagtgggtctggaacagattattctctcaccattagcaacctggagcaagaagatattgccacttacttttgccaacagggtaatacgcttccgtacacgttcggaggggggaccaagctggagatcacaggtggcggtggctcgggcggtggtgggtcgggtggcggcggatctgaggtgaaactgcaggagtcaggacctggcctggtggcgccctcacagagcctgtccgtcacatgcactgtctcaggggtctcattacccgactatggtgtaagctggattcgccagcctccacgaaagggtctggagtggctgggagtaatatggggtagtgaaaccacatactataattcagctctcaaatccagactgaccatcatcaaggacaactccaagagccaagttttcttaaaaatgaacagtctgcaaactgatgacacagccatttactactgtgccaaacattattactacggtggtagctatgctatggactactggggtcaaggaacctcagtcaccgtctcctcacgcgtagagcagaaactgatctcggaagaggatctggcgaagcccaccacgacgccagcgccgcgaccaccaacaccggcgcccaccatcgcgtcgcagcccctgtccctgcgcccagaggcgtgccggccagcggcggggggcgcagtgcacacgagggggctggacttcgcctgtgacatctacatctgggcgcccttggccgggacttgtggggtccttctcctgtcactggttatcaccctttactgcaaacggggcagaaagaaactcctgtatatattcaaacaaccatttatgagaccagtacaaactactcaagaggaagatggctgtagctgccgatttccagaagaagaagaaggaggatgtgaactgagagtgaagttcagcaggagcgcagacgcccccgcgtaccagcagggccagaaccagctctataacgagctgaatctaggacgaagagaggagtacgatgttttggacaagagacgtggccgggaccctgagatggggggaaagccgagaaggaagaaccctcaggaaggcctgtacaatgaactgcagaaagataagatggcggaggcctacagtgagattgggatgaaaggcgagcgccggaggggcaaggggcacgatggcctttaccagggtctcagtacagccaccaaggacacctacgacgcccttcacatgcaggccctgccccctcgctctagaggatctggagcaacaaacttctcactactcaaacaagcaggtgacgtggaggagaatcccgggcctgggatcctgatggactggatttggcgcatccttttccttgtcggcgctgctaccggcgcgcattctcaggtgcagctccaggagagtggcccaggacttgtgaagccaagtgaaactctctcactcacttgtgctgtgagtggatacagtatcagtgacgatcacgctgtcagctgggtacgacaacctcccggagagggtctggagtggatcggtttcatttcctatagtggcattacaaactacaaccccacacttcaggaccgcgtcacaatttcacgggacaattccaagaacaccctgtatctccagatgaatagtctgagggcagaggatacggctgtgtactactgtgcccggctgctcgcccgcgcaacagctatggacgtgtggggtgaggggaccctggtgaccgtaagttccggcggtggcggttcaggtggagggggaagcggtggtggtggctcagacattcaaatgacgcagagcccctcctctctgtcagcgagcgtgggagatagtgtcacgattacttgtcaggccagccaagacatttcctcatatctgaactggtatcagcagaagcccggcaaggcccccgaactgttgatctactacggcagcgagttggaatccggcgttccttctcgcttttccgggtccggctctggaacagatttcaccttcaccatttctagccttgaagcagaagacgccgccacttactactgcgggcaaggtaaccgattgccgtacaccttcggccagggtacaaaagtggaaatcgagctcgagaccgatttctacgactacaaggacgacgatgacaagactagtggctccggcgagggcagaggaagtctactaacctgcggagatgtggaagaaaatcctggcccacatatgaccgagtacaagcccacggtgcgcctcgccacccgcgacgacgtccccagggccgtacgcaccctcgccgccgcgttcgccgactaccccgccacgcgccacaccgtcgatccggaccgccacatcgagcgggtcaccgagctgcaagaactcttcctcacgcgcgtcgggctcgacatcggcaaggtgtgggtcgcggacgacggcgccgcggtggcggtctggaccacgccggagagcgtcgaagcgggggcggtgttcgccgagatcggcccgcgcatggccgagttgagcggttcccggctggccgcgcagcaacagatggaaggcctcctggcgccgcaccggcccaaggagcccgcgtggttcctggccaccgtcggcgtctcgcccgaccaccagggcaagggtctgggcagcgccgtcgtgctccccggagtggaggcggccgagcgcgccggggtgcccgccttcctggagacctccgcgccccgcaacctccccttctacgagcggctcggcttcaccgtcaccgccgacgtcgaggtgcccgaaggaccgcgcacctggtgcatgacccgcaagcccggtgcctga

SEQ ID NO: 1764 - DNA, 2454 bp, Artificial Sequence
  Synthetic Polynucleotides
atggccttaccagtgaccgccttgctcctgccgctggccttgctgctccacgccgccaggccggacatccagatgacacagactacatcctccctgtctgcctctctgggagacagagtcaccatcagttgcagggcaagtcaggacattagtaaatatttaaattggtatcagcagaaaccagatggaactgttaaactcctgatctaccatacatcaagattacactcaggagtcccatcaaggttcagtggcagtgggtctggaacagattattctctcaccattagcaacctggagcaagaagatattgccacttacttttgccaacagggtaatacgcttccgtacacgttcggaggggggaccaagctggagatcacaggtggcggtggctcgggcggtggtgggtcgggtggcggcggatctgaggtgaaactgcaggagtcaggacctggcctggtggcgccctcacagagcctgtccgtcacatgcactgtctcaggggtctcattacccgactatggtgtaagctggattcgccagcctccacgaaagggtctggagtggctgggagtaatatggggtagtgaaaccacatactataattcagctctcaaatccagactgaccatcatcaaggacaactccaagagccaagttttcttaaaaatgaacagtctgcaaactgatgacacagccatttactactgtgccaaacattattactacggtggtagctatgctatggactactggggtcaaggaacctcagtcaccgtctcctcacgcgtagagcagaaactgatctcggaagaggatctggcgaagcccaccacgacgccagcgccgcgaccaccaacaccggcgcccaccatcgcgtcgcagcccctgtccctgcgcccagaggcgtgccggccagcggcggggggcgcagtgcacacgagggggctggacttcgcctgtgacatctacatctgggcgcccttggccgggacttgtggggtccttctcctgtcactggttatcaccctttactgcaaacggggcagaaagaaactcctgtatatattcaaacaaccatttatgagaccagtacaaactactcaagaggaagatggctgtagctgccgatttccagaagaagaagaaggaggatgtgaactgagagtgaagttcagcaggagcgcagacgcccccgcgtaccagcagggccagaaccagctctataacgagctgaatctaggacgaagagaggagtacgatgttttggacaagagacgtggccgggaccctgagatggggggaaagccgagaaggaagaaccctcaggaaggcctgtacaatgaactgcagaaagataagatggcggaggcctacagtgagattgggatgaaaggcgagcgccggaggggcaaggggcacgatggcctttaccagggtctcagtacagccaccaaggacacctacgacgcccttcacatgcaggccctgccccctcgctctagaggatctggagcaacaaacttctcactactcaaacaagcaggtgacgtggaggagaatcccgggcctgggatcctgaccatggactggatttggcgcatccttttccttgtcggcgctgctaccggcgcgcattctggccacagaccactggacaagaagcgggaagaggcgccctccctgcgcccagctcctccacccatcagtgggggtggctacagatcaggtggatcactcgagaccgatttctacgactacaaggacgacgatgacaagactagtggctccggcgagggcagaggaagtctactaacctgcggagatgtggaagaaaatcctggcccacatatgaccgagtacaagcccacggtgcgcctcgccacccgcgacgacgtccccagggccgtacgcaccctcgccgccgcgttcgccgactaccccgccacgcgccacaccgtcgatccggaccgccacatcgagcgggtcaccgagctgcaagaactcttcctcacgcgcgtcgggctcgacatcggcaaggtgtgggtcgcggacgacggcgccgcggtggcggtctggaccacgccggagagcgtcgaagcgggggcggtgttcgccgagatcggcccgcgcatggccgagttgagcggttcccggctggccgcgcagcaacagatggaaggcctcctggcgccgcaccggcccaaggagcccgcgtggttcctggccaccgtcggcgtctcgcccgaccaccagggcaagggtctgggcagcgccgtcgtgctccccggagtggaggcggccgagcgcgccggggtgcccgccttcctggagacctccgcgccccgcaacctccccttctacgagcggctcggcttcaccgtcaccgccgacgtcgaggtgcccgaaggaccgcgcacctggtgcatgacccgcaagcccggtgcctga

SEQ ID NO: 1765 - DNA, 3363 bp, Artificial Sequence
  Synthetic Polynucleotides
atggccttaccagtgaccgccttgctcctgccgctggccttgctgctccacgccgccaggccggacatccagatgacacagactacatcctccctgtctgcctctctgggagacagagtcaccatcagttgcagggcaagtcaggacattagtaaatatttaaattggtatcagcagaaaccagatggaactgttaaactcctgatctaccatacatcaagattacactcaggagtcccatcaaggttcagtggcagtgggtctggaacagattattctctcaccattagcaacctggagcaagaagatattgccacttacttttgccaacagggtaatacgcttccgtacacgttcggaggggggaccaagctggagatcacaggtggcggtggctcgggcggtggtgggtcgggtggcggcggatctgaggtgaaactgcaggagtcaggacctggcctggtggcgccctcacagagcctgtccgtcacatgcactgtctcaggggtctcattacccgactatggtgtaagctggattcgccagcctccacgaaagggtctggagtggctgggagtaatatggggtagtgaaaccacatactataattcagctctcaaatccagactgaccatcatcaaggacaactccaagagccaagttttcttaaaaatgaacagtctgcaaactgatgacacagccatttactactgtgccaaacattattactacggtggtagctatgctatggactactggggtcaaggaacctcagtcaccgtctcctcacgcgtagagcagaaactgatctcggaagaggatctggcgaagcccaccacgacgccagcgccgcgaccaccaacaccggcgcccaccatcgcgtcgcagcccctgtccctgcgcccagaggcgtgccggccagcggcggggggcgcagtgcacacgagggggctggacttcgcctgtgacatctacatctgggcgcccttggccgggacttgtggggtccttctcctgtcactggttatcaccctttactgcaaacggggcagaaagaaactcctgtatatattcaaacaaccatttatgagaccagtacaaactactcaagaggaagatggctgtagctgccgatttccagaagaagaagaaggaggatgtgaactgagagtgaagttcagcaggagcgcagacgcccccgcgtaccagcagggccagaaccagctctataacgagctgaatctaggacgaagagaggagtacgatgttttggacaagagacgtggccgggaccctgagatggggggaaagccgagaaggaagaaccctcaggaaggcctgtacaatgaactgcagaaagataagatggcggaggcctacagtgagattgggatgaaaggcgagcgccggaggggcaaggggcacgatggcctttaccagggtctcagtacagccaccaaggacacctacgacgcccttcacatgcaggccctgccccctcgctctagaggatctggagcaacaaacttctcactactcaaacaagcaggtgacgtggaggagaatcccgggcctgggatccgggcgcactttccgggctttggacagtcactcctgtacggctatcccgtctatgtattcggtgattgtgtgcaagccgattggtgtccagtgtccggtggtctgtgcagtacacggcttcaccggcacgccctgctggcaacttgccccgaacaccagcttacatgggacccaatcgacggtcgcgtagtgtcttctcccctccagtatctgattcctagattgccttcctttccaacacagaggaccagccggaccctgaaggttctgaccccaccgactacaccagtgtcccccaaagtgcctcccgccttcttccaaagtatgagaaaacatactccctataggaatggctgcttggagccaaccctcggtgaccaactcccctcactcgccttccccgaacctggcctgcgcccacagaacatctatactacttggggcaagactgtggtatgcctttacctgtaccagctgagtcccccgatgacatggcccctcatcccccacgtcattttctgtcacccacggcagctgggagcgttccttaccaaagttccgctcaaacgcctggaggaactgctgtataagatgtttctgcacactggtgccgtgatcgtgctgcccgaggacgatctgcccaccacaatgttccagccggtgcgggctccttgcatccagactgcttggtgcacaggccttctgccttaccactccatactcacaacccctggtctgatctggaccttcaatgacggaagccctatgatttcaggaccttgtcccaaggctggacagccatctctggttgtgcagtcatctctgctcatcttcgagaaattccaaaccaaggcctttcatccatcctacctcctctcccatcagctgatacagtacagctccttccacaacttgcacctgctctttgatgaatatacgaatattccagtcagcatactcttcaacaagggcgaggccgatgataatggcgaccagccgcctgagcctgccgcacagggtgaaagctccacacagaaggtgcggccctcccatactaacaatccaaagctcgagaccgatttctacgactacaaggacgacgatgacaagactagtggctccggcgagggcagaggaagtctactaacctgcggagatgtggaagaaaatcctggcccacatatgaccgagtacaagcccacggtgcgcctcgccacccgcgacgacgtccccagggccgtacgcaccctcgccgccgcgttcgccgactaccccgccacgcgccacaccgtcgatccggaccgccacatcgagcgggtcaccgagctgcaagaactcttcctcacgcgcgtcgggctcgacatcggcaaggtgtgggtcgcggacgacggcgccgcggtggcggtctggaccacgccggagagcgtcgaagcgggggcggtgttcgccgagatcggcccgcgcatggccgagttgagcggttcccggctggccgcgcagcaacagatggaaggcctcctggcgccgcaccggcccaaggagcccgcgtggttcctggccaccgtcggcgtctcgcccgaccaccagggcaagggtctgggcagcgccgtcgtgctccccggagtggaggcggccgagcgcgccggggtgcccgccttcctggagacctccgcgccccgcaacctccccttctacgagcggctcggcttcaccgtcaccgccgacgtcgaggtgcccgaaggaccgcgcacctggtgcatgacccgcaagcccggtgcctga

SEQ ID NO: 1766 - DNA, 3324 bp, Artificial Sequence; identical to SEQ ID NO: 1743
  Synthetic Polynucleotides

SEQ ID NO: 1767 - DNA, 3228 bp, Artificial Sequence
  Synthetic Polynucleotides
atggccttaccagtgaccgccttgctcctgccgctggccttgctgctccacgccgccaggccggacatccagatgacacagactacatcctccctgtctgcctctctgggagacagagtcaccatcagttgcagggcaagtcaggacattagtaaatatttaaattggtatcagcagaaaccagatggaactgttaaactcctgatctaccatacatcaagattacactcaggagtcccatcaaggttcagtggcagtgggtctggaacagattattctctcaccattagcaacctggagcaagaagatattgccacttacttttgccaacagggtaatacgcttccgtacacgttcggaggggggaccaagctggagatcacaggtggcggtggctcgggcggtggtgggtcgggtggcggcggatctgaggtgaaactgcaggagtcaggacctggcctggtggcgccctcacagagcctgtccgtcacatgcactgtctcaggggtctcattacccgactatggtgtaagctggattcgccagcctccacgaaagggtctggagtggctgggagtaatatggggtagtgaaaccacatactataattcagctctcaaatccagactgaccatcatcaaggacaactccaagagccaagttttcttaaaaatgaacagtctgcaaactgatgacacagccatttactactgtgccaaacattattactacggtggtagctatgctatggactactggggtcaaggaacctcagtcaccgtctcctcacgcgtagagcagaaactgatctcggaagaggatctggcgaagcccaccacgacgccagcgccgcgaccaccaacaccggcgcccaccatcgcgtcgcagcccctgtccctgcgcccagaggcgtgccggccagcggcggggggcgcagtgcacacgagggggctggacttcgcctgtgacatctacatctgggcgcccttggccgggacttgtggggtccttctcctgtcactggttatcaccctttactgcgggcgcgccagagtgaagttcagcaggagcgcagacgcccccgcgtaccagcagggccagaaccagctctataacgagctgaatctaggacgaagagaggagtacgatgttttggacaagagacgtggccgggaccctgagatggggggaaagccgagaaggaagaaccctcaggaaggcctgtacaatgaactgcagaaagataagatggcggaggcctacagtgagattgggatgaaaggcgagcgccggaggggcaaggggcacgatggcctttaccagggtctcagtacagccaccaaggacacctacgacgcccttcacatgcaggccctgccccctcgctctagaggatctggagcaacaaacttctcactactcaaacaagcaggtgacgtggaggagaatcccgggcctgggatccgggactacaaggacgacgatgacaaggcgcactttccgggctttggacagtcactcctgtacggctatcccgtctatgtattcggtgattgtgtgcaagccgattggtgtccagtgtccggtggtctgtgcagtacacggcttcaccggcacgccctgctggcaacttgccccgaacaccagcttacatgggacccaatcgacggtcgcgtagtgtcttctcccctccagtatctgattcctagattgccttcctttccaacacagaggaccagccggaccctgaaggttctgaccccaccgactacaccagtgtcccccaaagtgcctcccgccttcttccaaagtatgagaaaacatactccctataggaatggctgcttggagccaaccctcggtgaccaactcccctcactcgccttccccgaacctggcctgcgcccacagaacatctatactacttggggcaagactgtggtatgcctttacctgtaccagctgagtcccccgatgacatggcccctcatcccccacgtcattttctgtcacccacggcagctgggagcgttccttaccaaagttccgctcaaacgcctggaggaactgctgtataagatgtttctgcacactggtgccgtgatcgtgctgcccgaggacgatctgcccaccacaatgttccagccggtgcgggctccttgcatccagactgcttggtgcacaggccttctgccttaccactccatactcacaacccctggtctgatctggaccttcaatgacggaagccctatgatttcaggaccttgtcccaaggctggacagccatctctggttgtgcagtcatctctgctcatcttcgagaaattccaaaccaaggcctttcatccatcctacctcctctcccatcagctgatacagtacagctccttccacaacttgcacctgctctttgatgaatatacgaatattccagtcagcagaagcttcaacaagggcgaggccgatgataatggcgaccagccgcctgagcctgccgcacagggtgaaagctccacacagaaggtgcggccctcccatactaacaatccaaagactagtggctccggcgagggcagaggaagtctactaacctgcggagatgtggaagaaaatcctggcccacatatgaccgagtacaagcccacggtgcgcctcgccacccgcgacgacgtccccagggccgtacgcaccctcgccgccgcgttcgccgactaccccgccacgcgccacaccgtcgatccggaccgccacatcgagcgggtcaccgagctgcaagaactcttcctcacgcgcgtcgggctcgacatcggcaaggtgtgggtcgcggacgacggcgccgcggtggcggtctggaccacgccggagagcgtcgaagcgggggcggtgttcgccgagatcggcccgcgcatggccgagttgagcggttcccggctggccgcgcagcaacagatggaaggcctcctggcgccgcaccggcccaaggagcccgcgtggttcctggccaccgtcggcgtctcgcccgaccaccagggcaagggtctgggcagcgccgtcgtgctccccggagtggaggcggccgagcgcgccggggtgcccgccttcctggagacctccgcgccccgcaacctccccttctacgagcggctcggcttcaccgtcaccgccgacgtcgaggtgcccgaaggaccgcgcacctggtgcatgacccgcaagcccggtgcctga

SEQ ID NO: 1768 - DNA, 3324 bp, Artificial Sequence
  Synthetic Polynucleotides
atggccttaccagtgaccgccttgctcctgccgctggccttgctgctccacgccgccaggccggacatccagatgacacagactacatcctccctgtctgcctctctgggagacagagtcaccatcagttgcagggcaagtcaggacattagtaaatatttaaattggtatcagcagaaaccagatggaactgttaaactcctgatctaccatacatcaagattacactcaggagtcccatcaaggttcagtggcagtgggtctggaacagattattctctcaccattagcaacctggagcaagaagatattgccacttacttttgccaacagggtaatacgcttccgtacacgttcggaggggggaccaagctggagatcacaggtggcggtggctcgggcggtggtgggtcgggtggcggcggatctgaggtgaaactgcaggagtcaggacctggcctggtggcgccctcacagagcctgtccgtcacatgcactgtctcaggggtctcattacccgactatggtgtaagctggattcgccagcctccacgaaagggtctggagtggctgggagtaatatggggtagtgaaaccacatactataattcagctctcaaatccagactgaccatcatcaaggacaactccaagagccaagttttcttaaaaatgaacagtctgcaaactgatgacacagccatttactactgtgccaaacattattactacggtggtagctatgctatggactactggggtcaaggaacctcagtcaccgtctcctcacgcgtagagcagaaactgatctcggaagaggatctggcgaagcccaccacgacgccagcgccgcgaccaccaacaccggcgcccaccatcgcgtcgcagcccctgtccctgcgcccagaggcgtgccggccagcggcggggggcgcagtgcacacgagggggctggacttcgcctgtgacatctacatctgggcgcccttggccgggacttgtggggtccttctcctgtcactggttatcaccctttactgcaaacggggcagaaagaaactcctgtatatattcaaacaaccatttatgagaccagtacaaactactcaagaggaagatggctgtagctgccgatttccagaagaagaagaaggaggatgtgaactgagagtgaagttcagcaggagcgcagacgcccccgcgtaccagcagggccagaaccagctctataacgagctgaatctaggacgaagagaggagtacgatgttttggacaagagacgtggccgggaccctgagatggggggaaagccgagaaggaagaaccctcaggaaggcctgtacaatgaactgcagaaagataagatggcggaggcctacagtgagattgggatgaaaggcgagcgccggaggggcaaggggcacgatggcctttaccagggtctcagtacagccaccaaggacacctacgacgcccttcacatgcaggccctgccccctcgctctagaggatctggagcaacaaacttctcactactcaaacaagcaggtgacgtggaggagaatcccgggcctgggatccggatggcgcactttccgggctttggacagtcactcctgtacggctatcccgtctatgtattcggtgattgtgtgcaagccgattggtgtccagtgtccggtggtctgtgcagtacacggcttcaccggcacgccctgctggcaacttgccccgaacaccagcttacatgggacccaatcgacggtcgcgtagtgtcttctcccctccagtatctgattcctagattgccttcctttccaacacagaggaccagccggaccctgaaggttctgaccccaccgactacaccagtgtcccccaaagtgcctcccgccttcttccaaagtatgagaaaacatactccctataggaatggctgcttggagccaaccctcggtgaccaactcccctcactcgccttccccgaacctggcctgcgcccacagaacatctatactacttggggcaagactgtggtatgcctttacctgtaccagctgagtcccccgatgacatggcccctcatcccccacgtcattttctgtcacccacggcagctgggagcgttccttaccaaagttccgctcaaacgcctggaggaactgctgtataagatgtttctgcacactggtgccgtgatcgtgctgcccgaggacgatctgcccaccacaatgttccagccggtgcgggctccttgcatccagactgcttggtgcacaggccttctgccttaccactccatactcacaacccctggtctgatctggaccttcaatgacggaagccctatgatttcaggaccttgtcccaaggctggacagccatctctggttgtgcagtcatctctgctcatcttcgagaaattccaaaccaaggcctttcatccatcctacctcctctcccatcagctgatacagtacagctccttccacaacttgcacctgctctttgatgaatatacgaatattccagtcagcatactcttcaacaagggcgaggccgatgataatggcgaccagccgcctgagcctgccgcacagggtgaaagctccacacagaaggtgcggccctcccatactaacaatccaaagactagtggctccggcgagggcagaggaagtctactaacctgcggagatgtggaagaaaatcctggcccacatatgaccgagtacaagcccacggtgcgcctcgccacccgcgacgacgtccccagggccgtacgcaccctcgccgccgcgttcgccgactaccccgccacgcgccacaccgtcgatccggaccgccacatcgagcgggtcaccgagctgcaagaactcttcctcacgcgcgtcgggctcgacatcggcaaggtgtgggtcgcggacgacggcgccgcggtggcggtctggaccacgccggagagcgtcgaagcgggggcggtgttcgccgagatcggcccgcgcatggccgagttgagcggttcccggctggccgcgcagcaacagatggaaggcctcctggcgccgcaccggcccaaggagcccgcgtggttcctggccaccgtcggcgtctcgcccgaccaccagggcaagggtctgggcagcgccgtcgtgctccccggagtggaggcggccgagcgcgccggggtgcccgccttcctggagacctccgcgccccgcaacctccccttctacgagcggctcggcttcaccgtcaccgccgacgtcgaggtgcccgaaggaccgcgcacctggtgcatgacccgcaagcccggtgcctga

SEQ ID NO: 1769 - DNA, 2157 bp, Artificial Sequence
  Synthetic Polynucleotides
atggccttaccagtgaccgccttgctcctgccgctggccttgctgctccacgccgccaggccggacatccagatgacacagactacatcctccctgtctgcctctctgggagacagagtcaccatcagttgcagggcaagtcaggacattagtaaatatttaaattggtatcagcagaaaccagatggaactgttaaactcctgatctaccatacatcaagattacactcaggagtcccatcaaggttcagtggcagtgggtctggaacagattattctctcaccattagcaacctggagcaagaagatattgccacttacttttgccaacagggtaatacgcttccgtacacgttcggaggggggaccaagctggagatcacaggtggcggtggctcgggcggtggtgggtcgggtggcggcggatctgaggtgaaactgcaggagtcaggacctggcctggtggcgccctcacagagcctgtccgtcacatgcactgtctcaggggtctcattacccgactatggtgtaagctggattcgccagcctccacgaaagggtctggagtggctgggagtaatatggggtagtgaaaccacatactataattcagctctcaaatccagactgaccatcatcaaggacaactccaagagccaagttttcttaaaaatgaacagtctgcaaactgatgacacagccatttactactgtgccaaacattattactacggtggtagctatgctatggactactggggtcaaggaacctcagtcaccgtctcctcacgcgtagagcagaaactgatctcggaagaggatctgaaaattgaagttatgtatcctcctccttacctagacaatgagaagagcaatggaaccattatccatgtgaaagggaaacacctttgtccaagtcccctatttcccggaccttctaagcccttttgggtgctggtggtggttgggggagtcctggcttgctatagcttgctagtaacagtggcctttattattttctgggtgaggagtaagaggagcaggctcctgcacagtgactacatgaacatgactccacgccgccccggacccacccgcaagcattaccagccctatgccccaccacgcgacttcgcagcctatcgctccagagtgaagttcagcaggagcgcagacgcccccgcgtaccagcagggccagaaccagctctataacgagctcaatctaggacgaagagaggagtacgatgttttggacaagagacgtggccgggaccctgagatggggggaaagccgagaaggaagaaccctcaggaaggcctgtacaatgaactgcagaaagataagatggcggaggcctacagtgagattgggatgaaaggcgagcgccggaggggcaaggggcacgatggcctttaccagggtctcagtacagccaccaaggacacctacgacgcccttcacatgcaggccctgccccctcgctctagtggctccggcgagggcagaggaagtctactaacctgcggagatgtggaagaaaatcctggcccacatatgaccgagtacaagcccacggtgcgcctcgccacccgcgacgacgtccccagggccgtacgcaccctcgccgccgcgttcgccgactaccccgccacgcgccacaccgtcgatccggaccgccacatcgagcgggtcaccgagctgcaagaactcttcctcacgcgcgtcgggctcgacatcggcaaggtgtgggtcgcggacgacggcgccgcggtggcggtctggaccacgccggagagcgtcgaagcgggggcggtgttcgccgagatcggcccgcgcatggccgagttgagcggttcccggctggccgcgcagcaacagatggaaggcctcctggcgccgcaccggcccaaggagcccgcgtggttcctggccaccgtcggcgtctcgcccgaccaccagggcaagggtctgggcagcgccgtcgtgctccccggagtggaggcggccgagcgcgccggggtgcccgccttcctggagacctccgcgccccgcaacctccccttctacgagcggctcggcttcaccgtcaccgccgacgtcgaggtgcccgaaggaccgcgcacctggtgcatgacccgcaagcccggtgcctga

SEQ ID NO: 1770 - DNA, 3084 bp, Artificial Sequence
  Synthetic Polynucleotides
atggccttaccagtgaccgccttgctcctgccgctggccttgctgctccacgccgccaggccggacatccagatgacacagactacatcctccctgtctgcctctctgggagacagagtcaccatcagttgcagggcaagtcaggacattagtaaatatttaaattggtatcagcagaaaccagatggaactgttaaactcctgatctaccatacatcaagattacactcaggagtcccatcaaggttcagtggcagtgggtctggaacagattattctctcaccattagcaacctggagcaagaagatattgccacttacttttgccaacagggtaatacgcttccgtacacgttcggaggggggaccaagctggagatcacaggtggcggtggctcgggcggtggtgggtcgggtggcggcggatctgaggtgaaactgcaggagtcaggacctggcctggtggcgccctcacagagcctgtccgtcacatgcactgtctcaggggtctcattacccgactatggtgtaagctggattcgccagcctccacgaaagggtctggagtggctgggagtaatatggggtagtgaaaccacatactataattcagctctcaaatccagactgaccatcatcaaggacaactccaagagccaagttttcttaaaaatgaacagtctgcaaactgatgacacagccatttactactgtgccaaacattattactacggtggtagctatgctatggactactggggtcaaggaacctcagtcaccgtctcctcacgcgtagagcagaaactgatctcggaagaggatctggcgaagcccaccacgacgccagcgccgcgaccaccaacaccggcgcccaccatcgcgtcgcagcccctgtccctgcgcccagaggcgtgccggccagcggcggggggcgcagtgcacacgagggggctggacttcgcctgtgacatctacatctgggcgcccttggccgggacttgtggggtccttctcctgtcactggttatcaccctttactgcgggcgcgccagagtgaagttcagcaggagcgcagacgcccccgcgtaccagcagggccagaaccagctctataacgagctgaatctaggacgaagagaggagtacgatgttttggacaagagacgtggccgggaccctgagatggggggaaagccgagaaggaagaaccctcaggaaggcctgtacaatgaactgcagaaagataagatggcggaggcctacagtgagattgggatgaaaggcgagcgccggaggggcaaggggcacgatggcctttaccagggtctcagtacagccaccaaggacacctacgacgcccttcacatgcaggccctgccccctcgctctagaggatctggagcaacaaacttctcactactcaaacaagcaggtgacgtggaggagaatcccgggcctgggatccacatgactagaggagtgcaggtggagactatctccccaggagacgggcgcaccttccccaagcgcggccagacctgcgtggtgcactacaccgggatgcttgaagatggaaagaaagttgattcctcccgggacagaaacaagccctttaagtttatgctaggcaagcaggaggtgatccgaggctgggaagaaggggttgcccagatgagtgtgggtcagagagccaaactgactatatctccagattatgcctatggtgccactgggcacccaggcatcatcccaccacatgccactctcgtcttcgatgtggagcttctaaaactggaagggatccacatggccacttacgaggttctctgtgaggtggcgcggaaactgggcacggatgacagggaagtggtattgttcctcctaaacgtgttcatacctcaacccacactggcccaattaattggagctcttagagctttaaaggaggagggcaggttaacgtttcccctgttagcggaatgtctgtttcgtgcaggtcgcagagacctcttgcgcgacctgcttcacttagacccgcgttttttagagcgccacctagcgggcacaatgagttatttcagcccttatcagctcactgttctccacgtagacggggagctgtgtgcgagggatattaggtctttgatatttttaagcaaggacactatagggtctcgcagcacaccacagacattcttacactgggtgtactgtatggaaaacttagacctactgggtcccactgacgtggatgccctaatgtcaatgcttagatctttgtcaagagtagacctacagcgccaagtgcaaaccctaatgggccttcacctttccggcccatcacactcccaacactatcgccatacaccactcgagaccgatttctacgactacaaggacgacgatgacaagactagtggctccggcgagggcagaggaagtctactaacctgcggagatgtggaagaaaatcctggcccacatatgaccgagtacaagcccacggtgcgcctcgccacccgcgacgacgtccccagggccgtacgcaccctcgccgccgcgttcgccgactaccccgccacgcgccacaccgtcgatccggaccgccacatcgagcgggtcaccgagctgcaagaactcttcctcacgcgcgtcgggctcgacatcggcaaggtgtgggtcgcggacgacggcgccgcggtggcggtctggaccacgccggagagcgtcgaagcgggggcggtgttcgccgagatcggcccgcgcatggccgagttgagcggttcccggctggccgcgcagcaacagatggaaggcctcctggcgccgcaccggcccaaggagcccgcgtggttcctggccaccgtcggcgtctcgcccgaccaccagggcaagggtctgggcagcgccgtcgtgctccccggagtggaggcggccgagcgcgccggggtgcccgccttcctggagacctccgcgccccgcaacctccccttctacgagcggctcggcttcaccgtcaccgccgacgtcgaggtgcccgaaggaccgcgcacctggtgcatgacccgcaagcccggtgcctga

SEQ ID NO: 1771 - DNA, 2160 bp, Artificial Sequence
  Synthetic Polynucleotides
atggccttaccagtgaccgccttgctcctgccgctggccttgctgctccacgccgccaggccggacgacatcgtgctgacccagagccccgccagcctggccgtgagcctgggccagagcgtgaccatcagctgcagagccagcgagagcgtggagtactacggcaccagcctgatgcagtggtaccagcagaagcccggccagccccccaagctgctgatctacgccaccagcaacgtggagagcggcgtgcccgccagattcagcggcagcggcagcggcaccgacttcagcctgaacatccaccccgtggaggaggacgacatcgccatgtacttctgccagcagagcagaaagctgcccagcaccttcggcggcggcaccaagctggagatcaagggcggaggcggaagtggaggcggaggatctggcggcggaggctctgacgtgagactgcaggagagcggccccggccaggtgaagcccagccagaccgtgagcctgacctgcagcgtgaccggctacagcatcaccaacggcaaccactggtggaactggatcagacaggtgagcggcagcaagctggagtggatcggctacatcagcagcagcggcagcaccgacagcaaccccagcctgaagagcagaatcagcatcaccagagacaccagcaagaaccagctgttcctgcagctgaacagcgtgaccaccgaggacatcgccacctactactgcgccagaggctactacttcgactactggggccagggcaccaccctgaccgtgagcagcacgcgtgagcagaaactgatctcggaagaggatctgaaaattgaagttatgtatcctcctccttacctagacaatgagaagagcaatggaaccattatccatgtgaaagggaaacacctttgtccaagtcccctatttcccggaccttctaagcccttttgggtgctggtggtggttgggggagtcctggcttgctatagcttgctagtaacagtggcctttattattttctgggtgaggagtaagaggagcaggctcctgcacagtgactacatgaacatgactccacgccgccccggacccacccgcaagcattaccagccctatgccccaccacgcgacttcgcagcctatcgctccagagtgaagttcagcaggagcgcagacgcccccgcgtaccagcagggccagaaccagctctataacgagctcaatctaggacgaagagaggagtacgatgttttggacaagagacgtggccgggaccctgagatggggggaaagccgagaaggaagaaccctcaggaaggcctgtacaatgaactgcagaaagataagatggcggaggcctacagtgagattgggatgaaaggcgagcgccggaggggcaaggggcacgatggcctttaccagggtctcagtacagccaccaaggacacctacgacgcccttcacatgcaggccctgccccctcgctctagtggctccggcgagggcagaggaagtctactaacctgcggagatgtggaagaaaatcctggcccacatatgaccgagtacaagcccacggtgcgcctcgccacccgcgacgacgtccccagggccgtacgcaccctcgccgccgcgttcgccgactaccccgccacgcgccacaccgtcgatccggaccgccacatcgagcgggtcaccgagctgcaagaactcttcctcacgcgcgtcgggctcgacatcggcaaggtgtgggtcgcggacgacggcgccgcggtggcggtctggaccacgccggagagcgtcgaagcgggggcggtgttcgccgagatcggcccgcgcatggccgagttgagcggttcccggctggccgcgcagcaacagatggaaggcctcctggcgccgcaccggcccaaggagcccgcgtggttcctggccaccgtcggcgtctcgcccgaccaccagggcaagggtctgggcagcgccgtcgtgctccccggagtggaggcggccgagcgcgccggggtgcccgccttcctggagacctccgcgccccgcaacctccccttctacgagcggctcggcttcaccgtcaccgccgacgtcgaggtgcccgaaggaccgcgcacctggtgcatgacccgcaagcccggtgcctga

SEQ ID NO: 1772 - DNA, 2160 bp, Artificial Sequence
  Synthetic Polynucleotides
atggccttaccagtgaccgccttgctcctgccgctggccttgctgctccacgccgccaggccggacgagatcgtgctgacacagagccccgccaccctgtcactgtctccaggcgaaagagccaccctgagctgtagcgccagcagcagcgtgtcctacatgcactggtatcagcagaagcccggccaggcccccagactgctgatctacgataccagcaagctggcctccggcatccccgccagattttctggcagcggctccggcaccgacttcaccctgacaatcagcagcctggaacccgaggacgtggccgtgtactactgttttcaaggcagcgtgtaccccttcaccttcggccagggcaccaagctggaaatcaagagaggtggcggtggctcgggcggtggtgggtcgggtggcggcggatctcaggtgcagctccaggaatctggccctggcctcgtgaagcctagccagaccctgagcctgacctgtaccgtgtctggcggcagcatcagcacaagcggcatgggcgtgggctggatcagacagcaccctggcaagggcctggaatggatcggccacatttggtgggacgacgacaagcggtacaaccccgccctgaagtccagagtgaccatcagcgtggacaccagcaagaaccagttcagcctgaagctgagcagcgtgacagccgccgataccgccgtgtattattgcgcccggatggaactgtggtcctactacttcgactactggggccagggaaccctcgtgaccgtgtctagtacgcgtgagcagaaactgatctcggaagaggatctgaaaattgaagttatgtatcctcctccttacctagacaatgagaagagcaatggaaccattatccatgtgaaagggaaacacctttgtccaagtcccctatttcccggaccttctaagcccttttgggtgctggtggtggttgggggagtcctggcttgctatagcttgctagtaacagtggcctttattattttctgggtgaggagtaagaggagcaggctcctgcacagtgactacatgaacatgactccacgccgccccggacccacccgcaagcattaccagccctatgccccaccacgcgacttcgcagcctatcgctccagagtgaagttcagcaggagcgcagacgcccccgcgtaccagcagggccagaaccagctctataacgagctcaatctaggacgaagagaggagtacgatgttttggacaagagacgtggccgggaccctgagatggggggaaagccgagaaggaagaaccctcaggaaggcctgtacaatgaactgcagaaagataagatggcggaggcctacagtgagattgggatgaaaggcgagcgccggaggggcaaggggcacgatggcctttaccagggtctcagtacagccaccaaggacacctacgacgcccttcacatgcaggccctgccccctcgctctagtggctccggcgagggcagaggaagtctactaacctgcggagatgtggaagaaaatcctggcccacatatgaccgagtacaagcccacggtgcgcctcgccacccgcgacgacgtccccagggccgtacgcaccctcgccgccgcgttcgccgactaccccgccacgcgccacaccgtcgatccggaccgccacatcgagcgggtcaccgagctgcaagaactcttcctcacgcgcgtcgggctcgacatcggcaaggtgtgggtcgcggacgacggcgccgcggtggcggtctggaccacgccggagagcgtcgaagcgggggcggtgttcgccgagatcggcccgcgcatggccgagttgagcggttcccggctggccgcgcagcaacagatggaaggcctcctggcgccgcaccggcccaaggagcccgcgtggttcctggccaccgtcggcgtctcgcccgaccaccagggcaagggtctgggcagcgccgtcgtgctccccggagtggaggcggccgagcgcgccggggtgcccgccttcctggagacctccgcgccccgcaacctccccttctacgagcggctcggcttcaccgtcaccgccgacgtcgaggtgcccgaaggaccgcgcacctggtgcatgacccgcaagcccggtgcctga

SEQ ID NO: 1773 - DNA, 2172 bp, Artificial Sequence
  Synthetic Polynucleotides
atggccttaccagtgaccgccttgctcctgccgctggccttgctgctccacgccgccaggccggacatccagatgacacagtctccggcgtcactgtccgcctccgtgggggagactgtgactattatttgtagggcatcagttaacatctactcttatttggcctggtaccagcagaagcaaggcaagagtcctcagctgctggtgtataatgcgaagatcctggcagagggcgtgccgagccggttctccggcagcggctcaggtacccaattttccctcaagatcaattcactgcagccagaggactttggcagttactattgtcaacaccactacggcacattcactttcgggtccggtacaaaattggagattaagcgaggcggaggcggaagtggaggcggaggatctggcggcggaggctctcaggtacagttgaaagaaagcgggcctggactggtagcgccttcccaatctctctccatcacgtgcaccatctctggcttctccctgacttcctatggagttcactgggtgaggcagccccccggcaagggactggaatggctggtcgtcatctggtccgacgggtccacaacctacaactccgctctgaaaagtcggctctctatttctaaagataatagcaagagccaggtgtttctgaaaatgaactctctgcagaccgatgatacggccatttactactgcgcttcacactatggctcaaccttggcattcgcttcctggggccacggaacactggtgaccgtttccgcagccacgcgtctcgagactagtacgcgtgagcagaaactgatctcggaagaggatctgaaaattgaagttatgtatcctcctccttacctagacaatgagaagagcaatggaaccattatccatgtgaaagggaaacacctttgtccaagtcccctatttcccggaccttctaagcccttttgggtgctggtggtggttgggggagtcctggcttgctatagcttgctagtaacagtggcctttattattttctgggtgaggagtaagaggagcaggctcctgcacagtgactacatgaacatgactccacgccgccccggacccacccgcaagcattaccagccctatgccccaccacgcgacttcgcagcctatcgctccagagtgaagttcagcaggagcgcagacgcccccgcgtaccagcagggccagaaccagctctataacgagctcaatctaggacgaagagaggagtacgatgttttggacaagagacgtggccgggaccctgagatggggggaaagccgagaaggaagaaccctcaggaaggcctgtacaatgaactgcagaaagataagatggcggaggcctacagtgagattgggatgaaaggcgagcgccggaggggcaaggggcacgatggcctttaccagggtctcagtacagccaccaaggacacctacgacgcccttcacatgcaggccctgccccctcgctctagtggctccggcgagggcagaggaagtctactaacctgcggagatgtggaagaaaatcctggcccacatatgaccgagtacaagcccacggtgcgcctcgccacccgcgacgacgtccccagggccgtacgcaccctcgccgccgcgttcgccgactaccccgccacgcgccacaccgtcgatccggaccgccacatcgagcgggtcaccgagctgcaagaactcttcctcacgcgcgtcgggctcgacatcggcaaggtgtgggtcgcggacgacggcgccgcggtggcggtctggaccacgccggagagcgtcgaagcgggggcggtgttcgccgagatcggcccgcgcatggccgagttgagcggttcccggctggccgcgcagcaacagatggaaggcctcctggcgccgcaccggcccaaggagcccgcgtggttcctggccaccgtcggcgtctcgcccgaccaccagggcaagggtctgggcagcgccgtcgtgctccccggagtggaggcggccgagcgcgccggggtgcccgccttcctggagacctccgcgccccgcaacctccccttctacgagcggctcggcttcaccgtcaccgccgacgtcgaggtgcccgaaggaccgcgcacctggtgcatgacccgcaagcccggtgcctga

SEQ ID NO: 1774 - DNA, 2178 bp, Artificial Sequence
  Synthetic Polynucleotides
atggccttaccagtgaccgccttgctcctgccgctggccttgctgctccacgccgccaggccggacattgtgatgacccagtctcacaaattcatgtccacatcagtaggagacagggtcagcgtcacctgcaaggccagtcagaatgtgggtaataatgtagcctggtatcaacagaaaccagggcaatctcctaaagtactgatttactcggcatcctaccggtacagtggagtccctgatcgcttcacaggcagtggatctgggacagatttcactctcaccatcagtaatgtgcagtctgaagacttggcagagtatttctgtcagcaatataacacctatccattcacgttcggctcggggacaaagttggaaataaaaggcggaggcggaagtggaggcggaggatctggcggcggaggctctgaggtacagctggaggaaagcggtggaggactggtgcaacctggagggtctatgaagctctcttgcgtagcttctgggttcacgttctccaattactggatgaactgggtgcggcagtcccccgagaaaggcctggaatgggtagcagaaattcggttcaagtcccataactatgctacacactttgccgagtctgtcaaaggccggttcactattagtcgagacgacagcaagtcttcagtctacctgcagatgaataacttgcgggcagaggacacaggtatctactactgcaccaggagaatcggcaactccgactatgactggtggtactttgacgtctggggagcaggcaccagcgtgacggtgagttcagcctcaacgcgtgagcagaaactgatctcggaagaggatctgaaaattgaagttatgtatcctcctccttacctagacaatgagaagagcaatggaaccattatccatgtgaaagggaaacacctttgtccaagtcccctatttcccggaccttctaagcccttttgggtgctggtggtggttgggggagtcctggcttgctatagcttgctagtaacagtggcctttattattttctgggtgaggagtaagaggagcaggctcctgcacagtgactacatgaacatgactccacgccgccccggacccacccgcaagcattaccagccctatgccccaccacgcgacttcgcagcctatcgctccagagtgaagttcagcaggagcgcagacgcccccgcgtaccagcagggccagaaccagctctataacgagctcaatctaggacgaagagaggagtacgatgttttggacaagagacgtggccgggaccctgagatggggggaaagccgagaaggaagaaccctcaggaaggcctgtacaatgaactgcagaaagataagatggcggaggcctacagtgagattgggatgaaaggcgagcgccggaggggcaaggggcacgatggcctttaccagggtctcagtacagccaccaaggacacctacgacgcccttcacatgcaggccctgccccctcgctctagtggctccggcgagggcagaggaagtctactaacctgcggagatgtggaagaaaatcctggcccacatatgaccgagtacaagcccacggtgcgcctcgccacccgcgacgacgtccccagggccgtacgcaccctcgccgccgcgttcgccgactaccccgccacgcgccacaccgtcgatccggaccgccacatcgagcgggtcaccgagctgcaagaactcttcctcacgcgcgtcgggctcgacatcggcaaggtgtgggtcgcggacgacggcgccgcggtggcggtctggaccacgccggagagcgtcgaagcgggggcggtgttcgccgagatcggcccgcgcatggccgagttgagcggttcccggctggccgcgcagcaacagatggaaggcctcctggcgccgcaccggcccaaggagcccgcgtggttcctggccaccgtcggcgtctcgcccgaccaccagggcaagggtctgggcagcgccgtcgtgctccccggagtggaggcggccgagcgcgccggggtgcccgccttcctggagacctccgcgccccgcaacctccccttctacgagcggctcggcttcaccgtcaccgccgacgtcgaggtgcccgaaggaccgcgcacctggtgcatgacccgcaagcccggtgcctga

SEQ ID NO: 1775 - DNA, 2160 bp, Artificial Sequence; identical to SEQ ID NO: 1771
  Synthetic Polynucleotides

SEQ ID NO: 1776 - DNA, 2172 bp, Artificial Sequence
  Synthetic Polynucleotides
atggccttaccagtgaccgccttgctcctgccgctggccttgctgctccacgccgccaggccggacgacatccaaatgacacagagtccttctagtttgagtgcgagcgtgggggacagggtgaccattacctgcagggccagccagagcataagctcataccttaattggtaccagcaaaaaccaggtaaggcccctaagctcctgatctacgcggcctcttcacttcaatctggggtcccttcccgcttcagtggctccggcagcggcaccgacttcacgctcactatatcaagtctgcagcctgaggatctcgccacctattactgtcaacaaagttattccacccctttcacctttggaccgggcacgaaagtggatattaagggcggaggcggaagtggaggcggaggatctggcggcggaggctctgtgcacgaggtccagcttgtgcagtccggggcagaggtcaagaagcctggttctagcgtaaaagtgagttgcaaagcctcaggtgggacattttcatcctacgcgatcagttgggttagacaggctcctggtcaagggctggaatggatgggcggaattattccaatcttcggaacagcgaattacgcgcagaagttccagggtagagtaaccatcactgctgacaagtccacctccaccgcatacatggaattgtctagtctccggagcgaggatacggcggtgtattattgtgctacgttcgccctgtttggcttccgcgaacaggctttcgacatctgggggcagggcacgacagtcacggttagtagtacgcgtgagcagaaactgatctcggaagaggatctgaaaattgaagttatgtatcctcctccttacctagacaatgagaagagcaatggaaccattatccatgtgaaagggaaacacctttgtccaagtcccctatttcccggaccttctaagcccttttgggtgctggtggtggttgggggagtcctggcttgctatagcttgctagtaacagtggcctttattattttctgggtgaggagtaagaggagcaggctcctgcacagtgactacatgaacatgactccacgccgccccggacccacccgcaagcattaccagccctatgccccaccacgcgacttcgcagcctatcgctccagagtgaagttcagcaggagcgcagacgcccccgcgtaccagcagggccagaaccagctctataacgagctcaatctaggacgaagagaggagtacgatgttttggacaagagacgtggccgggaccctgagatggggggaaagccgagaaggaagaaccctcaggaaggcctgtacaatgaactgcagaaagataagatggcggaggcctacagtgagattgggatgaaaggcgagcgccggaggggcaaggggcacgatggcctttaccagggtctcagtacagccaccaaggacacctacgacgcccttcacatgcaggccctgccccctcgctctagtggctccggcgagggcagaggaagtctactaacctgcggagatgtggaagaaaatcctggcccacatatgaccgagtacaagcccacggtgcgcctcgccacccgcgacgacgtccccagggccgtacgcaccctcgccgccgcgttcgccgactaccccgccacgcgccacaccgtcgatccggaccgccacatcgagcgggtcaccgagctgcaagaactcttcctcacgcgcgtcgggctcgacatcggcaaggtgtgggtcgcggacgacggcgccgcggtggcggtctggaccacgccggagagcgtcgaagcgggggcggtgttcgccgagatcggcccgcgcatggccgagttgagcggttcccggctggccgcgcagcaacagatggaaggcctcctggcgccgcaccggcccaaggagcccgcgtggttcctggccaccgtcggcgtctcgcccgaccaccagggcaagggtctgggcagcgccgtcgtgctccccggagtggaggcggccgagcgcgccggggtgcccgccttcctggagacctccgcgccccgcaacctccccttctacgagcggctcggcttcaccgtcaccgccgacgtcgaggtgcccgaaggaccgcgcacctggtgcatgacccgcaagcccggtgcctga

SEQ ID NO: 1777 - DNA, 2166 bp, Artificial Sequence
  Synthetic Polynucleotides
atggccttaccagtgaccgccttgctcctgccgctggccttgctgctccacgccgccaggccggacgacatccagttgacccagtcccccagctcactcagcgccagtgtgggggaccgggtgaccattacctgtaaagccagtcagagtgtggactatgagggggatagcttcctgaattggtatcagcagaagcctggcaaagccccaaagctgctgatctacgctgcatctaatctggagtcaggcgtgccttctaggttctccggtagtgggtctgggaccgatttcacattgaccatttcatccctccaacccgaggatttcgctacatattactgtcagcagtccaatgaggaccctctcacctttggccagggcaccaaagttgaaattaagagaggcggaggcggaagtggaggcggaggatctggcggcggaggctctgaagtccaacttgtggagtctggagggggcctggtgcagcccggcggctctctcagactgtcttgtgcggcaagcggctacaccttcagctcttactggatagaatgggtgaggcaggcacctggaaagggactggagtggattggagagattctgccaggagggggagatacaaattacaatgaaatcttcaaggggcgggccaccttttcagcggataccagcaagaatacagcttacctgcagatgaatagcctccgggcagaagataccgctgtttattattgcacgagacgggtgccaataagactggactattgggggcaagggactcttgtcaccgtcagttcaacgcgtgagcagaaactgatctcggaagaggatctgaaaattgaagttatgtatcctcctccttacctagacaatgagaagagcaatggaaccattatccatgtgaaagggaaacacctttgtccaagtcccctatttcccggaccttctaagcccttttgggtgctggtggtggttgggggagtcctggcttgctatagcttgctagtaacagtggcctttattattttctgggtgaggagtaagaggagcaggctcctgcacagtgactacatgaacatgactccacgccgccccggacccacccgcaagcattaccagccctatgccccaccacgcgacttcgcagcctatcgctccagagtgaagttcagcaggagcgcagacgcccccgcgtaccagcagggccagaaccagctctataacgagctcaatctaggacgaagagaggagtacgatgttttggacaagagacgtggccgggaccctgagatggggggaaagccgagaaggaagaaccctcaggaaggcctgtacaatgaactgcagaaagataagatggcggaggcctacagtgagattgggatgaaaggcgagcgccggaggggcaaggggcacgatggcctttaccagggtctcagtacagccaccaaggacacctacgacgcccttcacatgcaggccctgccccctcgctctagtggctccggcgagggcagaggaagtctactaacctgcggagatgtggaagaaaatcctggcccacatatgaccgagtacaagcccacggtgcgcctcgccacccgcgacgacgtccccagggccgtacgcaccctcgccgccgcgttcgccgactaccccgccacgcgccacaccgtcgatccggaccgccacatcgagcgggtcaccgagctgcaagaactcttcctcacgcgcgtcgggctcgacatcggcaaggtgtgggtcgcggacgacggcgccgcggtggcggtctggaccacgccggagagcgtcgaagcgggggcggtgttcgccgagatcggcccgcgcatggccgagttgagcggttcccggctggccgcgcagcaacagatggaaggcctcctggcgccgcaccggcccaaggagcccgcgtggttcctggccaccgtcggcgtctcgcccgaccaccagggcaagggtctgggcagcgccgtcgtgctccccggagtggaggcggccgagcgcgccggggtgcccgccttcctggagacctccgcgccccgcaacctccccttctacgagcggctcggcttcaccgtcaccgccgacgtcgaggtgcccgaaggaccgcgcacctggtgcatgacccgcaagcccggtgcctga

SEQ ID NO: 1778 - DNA, 2157 bp, Artificial Sequence
  Synthetic Polynucleotides
atggccttaccagtgaccgccttgctcctgccgctggccttgctgctccacgccgccaggccggacatcgtgatgacccagagccagaagagcatgagcaccagcgtgggcgacagagtgagcatcacctgcaaggccagccaggacgtgatcaccggcgtggcctggtaccagcagaagcccggccagagccccaagctgctgatctacagcgccagctacagatacaccggcgtgcccgacagattcaccggcagcggcagcggcaccgacttcaccttcaccatcagcaacgtgcaggccgaggacctggccgtgtactactgccagcagcactacagcacccccctgaccttcggcgccggcaccaagctggagctgaagggcggaggcggaagtggaggcggaggatctggcggcggaggctctcaggtgcagctgcagcagcccggcgccgagctggtgagacccggcgccagcgtgaagctgagctgcaaggccagcggctacagcttcaccacctactggatgaactgggtgaagcagagacccggccagggcctggagtggatcggcatgatccaccccagcgacagcgagaccagactgaaccagaagttcaaggacaaggccaccctgaccgtggacaagagcagcagcaccgcctacatgcagctgagcagccccaccagcgaggacagcgccgtgtactactgcgccagaagcaccatgatcgccaccagagccatggactactggggccagggcaccagcgtgaccgtgagcagcacgcgtgagcagaaactgatctcggaagaggatctgaaaattgaagttatgtatcctcctccttacctagacaatgagaagagcaatggaaccattatccatgtgaaagggaaacacctttgtccaagtcccctatttcccggaccttctaagcccttttgggtgctggtggtggttgggggagtcctggcttgctatagcttgctagtaacagtggcctttattattttctgggtgaggagtaagaggagcaggctcctgcacagtgactacatgaacatgactccacgccgccccggacccacccgcaagcattaccagccctatgccccaccacgcgacttcgcagcctatcgctccagagtgaagttcagcaggagcgcagacgcccccgcgtaccagcagggccagaaccagctctataacgagctcaatctaggacgaagagaggagtacgatgttttggacaagagacgtggccgggaccctgagatggggggaaagccgagaaggaagaaccctcaggaaggcctgtacaatgaactgcagaaagataagatggcggaggcctacagtgagattgggatgaaaggcgagcgccggaggggcaaggggcacgatggcctttaccagggtctcagtacagccaccaaggacacctacgacgcccttcacatgcaggccctgccccctcgctctagtggctccggcgagggcagaggaagtctactaacctgcggagatgtggaagaaaatcctggcccacatatgaccgagtacaagcccacggtgcgcctcgccacccgcgacgacgtccccagggccgtacgcaccctcgccgccgcgttcgccgactaccccgccacgcgccacaccgtcgatccggaccgccacatcgagcgggtcaccgagctgcaagaactcttcctcacgcgcgtcgggctcgacatcggcaaggtgtgggtcgcggacgacggcgccgcggtggcggtctggaccacgccggagagcgtcgaagcgggggcggtgttcgccgagatcggcccgcgcatggccgagttgagcggttcccggctggccgcgcagcaacagatggaaggcctcctggcgccgcaccggcccaaggagcccgcgtggttcctggccaccgtcggcgtctcgcccgaccaccagggcaagggtctgggcagcgccgtcgtgctccccggagtggaggcggccgagcgcgccggggtgcccgccttcctggagacctccgcgccccgcaacctccccttctacgagcggctcggcttcaccgtcaccgccgacgtcgaggtgcccgaaggaccgcgcacctggtgcatgacccgcaagcccggtgcctga

SEQ ID NO: 1779 - DNA, 1821 bp, Artificial Sequence
  Synthetic Polynucleotides
atggactggatttggcgcatccttttccttgtcggcgctgctaccggcgcccattccttcgaagtgcaacttgtggagagcggtgggggctctgtgcaacctggcggcagtctgactctcagctgcggaacctcagggcgcacctttaatgtaatggggtggttcagacaagccccaggcaaggagcgggagtttgtcgctgccgtccgctggtccagtacggggatttattacactcaatacgcggattctgtgaagtccaggtttacaatttcccgcgataacgcgaaaaatacagtctacctggaaatgaatagcctgaaacccgaagatacagccgtgtattattgcgccgctgatacctataacagtaaccccgctcgctgggacggctacgacttcagagggcagggcacccaggtaacagtctccagtacgcgtgagcagaaactgatctcggaagaggatctggcgaagcccaccacgacgccagcgccgcgaccaccaacaccggcgcccaccatcgcgtcgcagcccctgtccctgcgcccagaggcgtgccggccagcggcggggggcgcagtgcacacgagggggctggacttcgcctgtgacatctacatctgggcgcccttggccgggacttgtggggtccttctcctgtcactggttatcaccctttactgcaaacggggcagaaagaaactcctgtatatattcaaacaaccatttatgagaccagtacaaactactcaagaggaagatggctgtagctgccgatttccagaagaagaagaaggaggatgtgaactgagagtgaagttcagcaggagcgcagacgcccccgcgtaccagcagggccagaaccagctctataacgagctgaatctaggacgaagagaggagtacgatgttttggacaagagacgtggccgggaccctgagatggggggaaagccgagaaggaagaaccctcaggaaggcctgtacaatgaactgcagaaagataagatggcggaggcctacagtgagattgggatgaaaggcgagcgccggaggggcaaggggcacgatggcctttaccagggtctcagtacagccaccaaggacacctacgacgcccttcacatgcaggccctgccccctcgctctagtggctccggcgagggcagaggaagtctactaacctgcggagatgtggaagaaaatcctggcccacatatgaccgagtacaagcccacggtgcgcctcgccacccgcgacgacgtccccagggccgtacgcaccctcgccgccgcgttcgccgactaccccgccacgcgccacaccgtcgatccggaccgccacatcgagcgggtcaccgagctgcaagaactcttcctcacgcgcgtcgggctcgacatcggcaaggtgtgggtcgcggacgacggcgccgcggtggcggtctggaccacgccggagagcgtcgaagcgggggcggtgttcgccgagatcggcccgcgcatggccgagttgagcggttcccggctggccgcgcagcaacagatggaaggcctcctggcgccgcaccggcccaaggagcccgcgtggttcctggccaccgtcggcgtctcgcccgaccaccagggcaagggtctgggcagcgccgtcgtgctccccggagtggaggcggccgagcgcgccggggtgcccgccttcctggagacctccgcgccccgcaacctccccttctacgagcggctcggcttcaccgtcaccgccgacgtcgaggtgcccgaaggaccgcgcacctggtgcatgacccgcaagcccggtgcctga

SEQ ID NO: 1780 - DNA, 1824 bp, Artificial Sequence
  Synthetic Polynucleotides
atggccttaccagtgaccgccttgctcctgccgctggccttgctgctccacgccgccaggccggacgaattcgaggtgcagctggtagaatccggcgggggacttgtacaggctggtggtagtctgagactgagctgtgtggcctccggcatcagcagcagcaagcggaacatgggatggtataggcaagcccctggtaagcagagggaatccgtggctacaatcagcagcggcggcaacaaggactacaccgacgccgtgaaggacaggttcaccatctccagggacaccaccaagaacaccgtgtacctgcagatgaactccctcaagcccgaggacaccgccgtgtactactgcaagatcgaggccggcacaggctgggccaccagaagaggctacacatactgggggcagggaacactggtgaccgtgagctccacgcgtgagcagaaactgatctcggaagaggatctggcgaagcccaccacgacgccagcgccgcgaccaccaacaccggcgcccaccatcgcgtcgcagcccctgtccctgcgcccagaggcgtgccggccagcggcggggggcgcagtgcacacgagggggctggacttcgcctgtgacatctacatctgggcgcccttggccgggacttgtggggtccttctcctgtcactggttatcaccctttactgcaaacggggcagaaagaaactcctgtatatattcaaacaaccatttatgagaccagtacaaactactcaagaggaagatggctgtagctgccgatttccagaagaagaagaaggaggatgtgaactgagagtgaagttcagcaggagcgcagacgcccccgcgtaccagcagggccagaaccagctctataacgagctgaatctaggacgaagagaggagtacgatgttttggacaagagacgtggccgggaccctgagatggggggaaagccgagaaggaagaaccctcaggaaggcctgtacaatgaactgcagaaagataagatggcggaggcctacagtgagattgggatgaaaggcgagcgccggaggggcaaggggcacgatggcctttaccagggtctcagtacagccaccaaggacacctacgacgcccttcacatgcaggccctgccccctcgctctagtggctccggcgagggcagaggaagtctactaacctgcggagatgtggaagaaaatcctggcccacatatgaccgagtacaagcccacggtgcgcctcgccacccgcgacgacgtccccagggccgtacgcaccctcgccgccgcgttcgccgactaccccgccacgcgccacaccgtcgatccggaccgccacatcgagcgggtcaccgagctgcaagaactcttcctcacgcgcgtcgggctcgacatcggcaaggtgtgggtcgcggacgacggcgccgcggtggcggtctggaccacgccggagagcgtcgaagcgggggcggtgttcgccgagatcggcccgcgcatggccgagttgagcggttcccggctggccgcgcagcaacagatggaaggcctcctggcgccgcaccggcccaaggagcccgcgtggttcctggccaccgtcggcgtctcgcccgaccaccagggcaagggtctgggcagcgccgtcgtgctccccggagtggaggcggccgagcgcgccggggtgcccgccttcctggagacctccgcgccccgcaacctccccttctacgagcggctcggcttcaccgtcaccgccgacgtcgaggtgcccgaaggaccgcgcacctggtgcatgacccgcaagcccggtgcctga

SEQ ID NO: 1781 - protein, 21 aa, Artificial Sequence
  Synthetic Polypeptide
MALPVTALLLPLALLLHAARP

SEQ ID NO: 1782 - protein, 19 aa, Artificial Sequence
  Synthetic Polypeptide
MDWIWRILFLVGAATGAHS

SEQ ID NO: 1783 - protein, 20 aa, Artificial Sequence
  Synthetic Polypeptide
MRLPAQLLGLLMLWVSGSSG

SEQ ID NO: 1784 - protein, 20 aa, Artificial Sequence
  Synthetic Polypeptide
MPPPRLLFFLLFLTPMEVRP

SEQ ID NO: 1785 - protein, 111 aa, Artificial Sequence
  Synthetic Polypeptide
QSVLTQPASVSGSPGQSITISCTGTSSDVGGYNYVSWYQQHPGKAPKLMIYDVNNRPSEVSNRFSGSKSGNTASLTISGLQAEDEADYYCSSYTTGSRAVFGGGTKLTVLG

SEQ ID NO: 1786 - protein, 110 aa, Artificial Sequence
  Synthetic Polypeptide
QSVVTQPPSVSAAPGQKVTISCSGSSSNIGNNYVSWYQQLPGTAPKLLIYDNNKRPSGIPDRFSGSKSGTSATLGITGLQTGDEADYYCGTWDGSLYTMLFGGGTKLTVL

SEQ ID NO: 1787 - protein, 113 aa, Artificial Sequence
  Synthetic Polypeptide
QSVLTQPPSVSGAPGQRVTISCTGSSSNIGAGYDVHWYQQLPGTAPKLLIFGNSNRPSGVPDRFSGFKSGTSASLAITGLQAEDEADYFCQSYDSSLSGSGVFGTGTKVTVLG

SEQ ID NO: 1788 - protein, 111 aa, Artificial Sequence
  Synthetic Polypeptide
DVQMIQTPDSLAVSLGQRATISCRASESVDNYGISFMHWYQQKPGQSPKLLIYRASNLESGIPARFSGSGSRTDFTLTINPVETDDVATYYCQQNNKDPPTFGGGTKLEIK

SEQ ID NO: 1789 - protein, 107 aa, Artificial Sequence
  Synthetic Polypeptide
DVQMIQTPSSLSASLGDRVTISCRASQDIGNYLNWYQQKPDGTVKLLIYYTSRLHSGVPSRFSGSGSGTEYSLTISNLEQEDIATYFCQQGSALPPTFGGGTKLEIN

SEQ ID NO: 1790 - protein, 112 aa, Artificial Sequence
  Synthetic Polypeptide
DVVMTQSPLSLPVTPGAPASISCRSSQSIVHSNGNTYLEWYLQKPGQSPKLLIYKVSNRFSGVPDRFSGSGSGTDFTLRISRVEAEDVGIYYCFQGSHVPPTFGPGTKLEIK

SEQ ID NO: 1791 - protein, 112 aa, Artificial Sequence
  Synthetic Polypeptide
QSVLTQPPSVSGAPGQRVTISCTGSSSNIGAGFDVHWYQQLPGTAPKLLIYGNSNRPSGVPDRFSGSKSGTSASLAITGLQAEDEADYYCQSYDSSLSGYVFGTGTKVTVLG

SEQ ID NO: 1792 - protein, 111 aa, Artificial Sequence
  Synthetic Polypeptide
QAVLTQPPSASGTPGQRVTISCSGSSSNIGSYTVSWYQQLPGTAPKFLIYSNNQRPSGVPDRFSGSKSGTSASLAISGLQSEDEADYYCAAWDDSLNGYVFGTGTKVTVLG

SEQ ID NO: 1793 - protein, 112 aa, Artificial Sequence
  Synthetic Polypeptide
DIVLTQSPATLSLSPGDRATISCRASESVTILGSHLIYWYQQKPGQPPRLLIQLASNVQTGVPARFSGSGSRTDFTLTISSVEPEDFAVYYCLQSRTIPRTFGQGTKLEIKR

SEQ ID NO: 1794 - protein, 108 aa, Artificial Sequence
  Synthetic Polypeptide
DIQMTQSPSSLSASVGDRVTITCSASQDISNYLNWYQQKPGKAPKLLIYYTSNLHSGVPSRFSGSGSGTDFTLTISSLQPEDFATYYCQQYRKLPWTFGQGTKLEIKR

SEQ ID NO: 1795 - protein, 114 aa, Artificial Sequence
  Synthetic Polypeptide
LPVLTQPPSASGTPGQRVTISCSGRSSNIGSNSVNWYRQLPGAAPKLLIYSNNQRPPGVPVRFSGSKSGTSASLAISGLQSEDEATYYCATWDDNLNVHYVFGTGTKVTVLGSR

SEQ ID NO: 1796 - protein, 111 aa, Artificial Sequence
  Synthetic Polypeptide
DIVLTQSPASLAVSLGERATINCRASESVSVIGAHLIHWYQQKPGQPPKLLIYLASNLETGVPARFSGSGSGTDFTLTISSLQAEDAAIYYCLQSRIFPRTFGQGTKLEIK

SEQ ID NO: 1797 - protein, 112 aa, Artificial Sequence
  Synthetic Polypeptide
DIVLTQSPATLSLSPGDRATLSCRASESVTILGSHLIYWYQQKPGQAPRLLIQLASNVQTGIPARFSGSGSRTDFTLTISSLEPEDFAVYYCLQSRTIPRTFGQGTKLEIKR

SEQ ID NO: 1798 - protein, 112 aa, Artificial Sequence
  Synthetic Polypeptide
DIVMTQSPDSLAVSLGERATINCKSSQSILYSSNQKNYLAWYQQKPGQSPKLLIYWASTRESGVPDRFSGSGSGTDFTLTISSLQAEDVAVYYCHQYISSYTFGQGTKLEIK

SEQ ID NO: 1799 - protein, 114 aa, Artificial Sequence
  Synthetic Polypeptide
DIVMTQSPDSLAVSLGERATINCESSQSLLNSGNQKNYLTWYQQKPGQPPKPLIYWASTRESGVPDRFSGSGSGTDFTLTISSLQAEDVAVYYCQNDYSYPYTFGQGTKLEIKR

SEQ ID NO: 1800 - protein, 111 aa, Artificial Sequence
  Synthetic Polypeptide
DIVLTQSPASLAVSLGQRATISCRASESVDNYGNTFMHWYQQKPGQPPKLLIYRASNLESGIPARFSGSGSRTDFTLTINPVEADDVATYYCQQSNEDPPTFGAGTKLELK

SEQ ID NO: 1801 - protein, 113 aa, Artificial Sequence
  Synthetic Polypeptide
DFVMTQSPDSLAVSLGERVTMSCKSSQSLLNSGNQKNYLTWYQQKPGQPPKLLIYWASTRESGVPDRFSGSGSGTDFTLTISSLQAEDVAVYYCQNDYSYPYTFGQGTKLEIK

SEQ ID NO: 1802 - protein, 113 aa, Artificial Sequence; identical to SEQ ID NO: 1801
  Synthetic Polypeptide

SEQ ID NO: 1803 - protein, 109 aa, Artificial Sequence
  Synthetic Polypeptide
EIVLTQSPGTLSLSPGERATLSCRASQSVSSSYLAWYQQKPGQAPRLLIYGASSRATGIPDRFSGSGSGTDFTLTISRLEPEDFAVYYCQQDYGFPWTFGQGTKVEIKR

SEQ ID NO: 1804 - protein, 111 aa, Artificial Sequence
  Synthetic Polypeptide
QFVLTQPPSVSTNPGSTVKLSCKRNTGNIGSNYVNWYQQKPGQSPTTMIYRDDKRPDGVPDRFSGSIDRSSNSALLTINNVQTEDEADYFCQSYSSGINIIFGGGTKLTVL

SEQ ID NO: 1805 - protein, 107 aa, Artificial Sequence
  Synthetic Polypeptide
DIQMTQSPASLSASLGETVTIECRPSEDIHSNVAWYQQKPGNSPQLLIYDASNLADGVPSRFSGSGSGTQYSLKINSLQSEDVASYFCHQYNIYPYTFGSGTKLELK

SEQ ID NO: 1806 - protein, 108 aa, Artificial Sequence
  Synthetic Polypeptide
EIVLTQSPATLSLSPGERATLSCRASQSVSSYLAWYQQKPGQAPRLLIYDASNRATGIPARFSGSGSGTDFTLTISSLEPEDFAVYYCQQRSNWPLTFGQGTKVEIKR

SEQ ID NO: 1807 - protein, 108 aa, Artificial Sequence
  Synthetic Polypeptide
DVQITQSPSYLAASPGETITINCRASKSISKDLAWYQEKPGKTNKLLIYSGSTLQSGIPSRFSGSGSGTDFTLTISSLEPEDFAMYYCQQHNKYPYTFGGGTKLEIKR

SEQ ID NO: 1808 - protein, 107 aa, Artificial Sequence
  Synthetic Polypeptide
DIQMTQSPASLSASLGETVTIECRTSKDIYSNLAWFQQEPGNSPQLLIYDASNLADGVPSRFSGSGSGTQYSLQINNLQSEDVASYFCHQYNNYPYTFGTGTKLELK

SEQ ID NO: 1809 - protein, 106 aa, Artificial Sequence
  Synthetic Polypeptide
EIVLTQSPTSMTASPGEQVTITCRASSSINYMHWYQQKPGASPRPWIYETSKLASGVPDRFSGSASGTSYSLTINNMEAEDAATYYCQQWNYPSWTFGGGTKLELK

SEQ ID NO: 1810 - protein, 113 aa, Artificial Sequence
  Synthetic Polypeptide
DIVMTQSPSSLAVSEGETVTINCKSSQSFLSSGDGKNYVAWYQYKPGQSPKLLIYWASTRQSGVPDRFIGSGSGTDFTLTISTVQAEDLAIYYCQQYYDTPLTFGSGTKLEIK

SEQ ID NO: 1811 - protein, 113 aa, Artificial Sequence
  Synthetic Polypeptide
DVLMTQTPVSLPVSLGGQVSISCRSSQSLVHSDGDTYLHWYLQKPGQSPQLLIYRVSNRFSGVPDRFSGSGSGTDFTLKISRVEPEDLGLYYCLQTTHFPPWTFGGGTKLEMK

SEQ ID NO: 1812 - protein, 107 aa, Artificial Sequence
  Synthetic Polypeptide
DIQMTQSTSSLSASLGDRVTISCSASQGINNYLNWYQQKPDGTVELLIYYTSTLQSGVPSRFSGSGSGTDYSLTISNLEPEDIGTYYCQQYSKLPRTFGGGTKLEIK

SEQ ID NO: 1813 - protein, 106 aa, Artificial Sequence
  Synthetic Polypeptide
DIQMTQSPASLSVSVGETVTITCRASENIYSNLAWYQQKQGKSPQLLVYAATNLADGVPSRFSGSGSGTQYSLKINSLQSEDFGSYYCQHFWGTWTFGGGTTLEIK

SEQ ID NO: 1814 - protein, 113 aa, Artificial Sequence
  Synthetic Polypeptide
DIVMTQAAPSIPVTPGESVSISCRSSKSLLNSNGNTYLYWFLQRPGQSPQLLIYRMSNLASGVPDRFSGSGSGTAFTLRISRVEAEDVGVYYCMQHLEYPFTFGAGTKLELKR

SEQ ID NO: 1815 - protein, 107 aa, Artificial Sequence
  Synthetic Polypeptide
EIVLTQSPATLSLSPGERATLSCSASSSVSYMHWYQQKPGQAPRLLIYDTSKLASGIPARFSGSGSGTDFTLTISSLEPEDVAVYYCFQGSVYPFTFGQGTKLEIKR

SEQ ID NO: 1816 - protein, 111 aa, Artificial Sequence
  Synthetic Polypeptide
DIQLTQSPASLAVSLGQRATISCKASQSVDYDGDSYLNWYQQIPGQPPKLLIYDASNLVSGIPPRFSGSGSGTDFTLNIHPVEKVDAATYHCQQSTEDPWTFGGGTKLEIK

SEQ ID NO: 1817 - protein, 107 aa, Artificial Sequence
  Synthetic Polypeptide
DIQMTQTTSSLSASLGDRVTISCRASQDISKYLNWYQQKPDGTVKLLIYHTSRLHSGVPSRFSGSGSGTDYSLTISNLEQEDIATYFCQQGNTLPYTFGGGTKLEIT

SEQ ID NO: 1818 - protein, 107 aa, Artificial Sequence; identical to SEQ ID NO: 1817
  Synthetic Polypeptide

SEQ ID NO: 1819 - protein, 107 aa, Artificial Sequence; identical to SEQ ID NO: 1817
  Synthetic Polypeptide

SEQ ID NO: 1820 - protein, 107 aa, Artificial Sequence
  Synthetic Polypeptide
EIVMTQSPATLSLSPGERATLSCRASQDISKYLNWYQQKPGQAPRLLIYHTSRLHSGIPARFSGSGSGTDYTLTISSLQPEDFAVYFCQQGNTLPYTFGQGTKLEIK

SEQ ID NO: 1821 - protein, 111 aa, Artificial Sequence
  Synthetic Polypeptide
EIVLTQSPDFQSVTPKEKVTITCRASESVDTFGISFMNWFQQKPDQSPKLLIHAASNQGSGVPSRFSGSGSGTDFTLTINSLEAEDAATYYCQQSKEVPFTFGGGTKVEIK

SEQ ID NO: 1822 - protein, 107 aa, Artificial Sequence
  Synthetic Polypeptide
AIQLTQSPSSLSASVGDRVTITCRASQGISSAQQKPGKAPKLLILAWYSSLESGVPSRFSGYDASGSGTDFTLTISSLQPEDFATYYCQQFNSYPYTFGQGTKLEIK

SEQ ID NO: 1823 - protein, 112 aa, Artificial Sequence
  Synthetic Polypeptide
DIVMTQSPATLSLSPGERATLSCRSSKSLQNVNGNTYLYWFQQKPGQSPQLLIYRMSNLNSGVPDRFSGSGSGTEFTLTISSLEPEDFAVYYCMQHLEYPITFGAGTKLEIK

SEQ ID NO: 1824 - protein, 111 aa, Artificial Sequence
  Synthetic Polypeptide
DILLTQSPATLSLSPGERATLSCRASQSVDYDGDSYLNWYQQKPGQPPKLLIYDASNLVSGIPPRFSGSGSGTDFTLTISRLEPEDFAVYHCQQSTEDPWTFGGGTKLEIK

SEQ ID NO: 1825 - protein, 111 aa, Artificial Sequence
  Synthetic Polypeptide
DILLTQSPATLSLSPGERATLSCRASQSVDNYGISFMNWYQQKPGQPPKLLIYAASNQGSGIPSRFSGSGSGTDFTLTISSLEPEDFAMYFCQQSNEVPRTFGGGTKLEIK

SEQ ID NO: 1826 - protein, 109 aa, Artificial Sequence
  Synthetic Polypeptide
DILLTQSPATLSLSPGERATLSCKASQNVGTNVAWYQQKPGQPPKLLIYSATYRNSGIPARFSGSGSGTEFTLTITNVQSKDLADYFYFCQYNRYPYTSGGGTKLEIKR

SEQ ID NO: 1827 - protein, 104 aa, Artificial Sequence
  Synthetic Polypeptide
QIVLTQSPATLSASPGEKATMTCSASSGVNYMHWYQQKPGTSPKRWIYDTDKTASGVPARFSGSGSGTSYSLTISSMEAEDAATYYCHQRGSYTFGGGTKLEIK

SEQ ID NO: 1828 - protein, 108 aa, Artificial Sequence
  Synthetic Polypeptide
DIQMTQSPSSLSASVGDRVTITCKASDHINNWLAWYQQKPGQAPKLLIYGATTLETGVPSRFSGSGSGTDYTLTISSLQPEDFATYYCQQSWNTPWTFGQGTKLEIKR

SEQ ID NO: 1829 - protein, 112 aa, Artificial Sequence
  Synthetic Polypeptide
DIQLTQSPSSLSASVGDRVTITCKASQSVDYDGDSYLNWYQQIPGKAPKLLIYDASNLVSGIPPRFSGSGSGTDYTFTISSLQPEDIATYHCQQSTEDPWTFGGGTKLQIKR

SEQ ID NO: 1830 - protein, 107 aa, Artificial Sequence
  Synthetic Polypeptide
EIVLTQSPATLSLSPGERATLSCRASQSVSSYLAWYQQKPGQAPRLLIYDASNRATGIPARFSGSGSGTDFTLTISSLEPEDFAVYYCQQRSNWPITFGQGTRLEIK

SEQ ID NO: 1831 - protein, 113 aa, Artificial Sequence
  Synthetic Polypeptide
DIVMTQTPLSLPVTPGEPASISCRSSKSLLHSNGITYLYWYLQKPGQSPQLLIYQMSNLVSGVPDRFSGSGSGTDFTLKISRVEAEDVGVYYCAQNLELPYTFGGGTKVEIKR

SEQ ID NO: 1832 - protein, 107 aa, Artificial Sequence
  Synthetic Polypeptide
DIVLTQSPAIITASPGEKVTMTCRASSSVNYMDWYQKKPGSSPKPWIYATSNLASGVPSRFSGSGSGTTYSMTISSLEAEDAATYYCQQWSFNPPTFGGGTKLEIKR

SEQ ID NO: 1833 - protein, 107 aa, Artificial Sequence
  Synthetic Polypeptide
EIVLTQSPATLSLSPGERATLSCRASQSVSSYLAWYQQKPGQAPRLLIYDASNRATGIPARFSGSGSGTDFTLTISSLEPEDFAVYYCQQRSDWPLTFGGGTKVEIK

SEQ ID NO: 1834 - protein, 107 aa, Artificial Sequence
  Synthetic Polypeptide
EIVLTQSPATLSLSPGERATLSCRASQSVSSYLAWYQQKPGQAPRLLIYDASNRATGIPARFSGSGSGTDFTLTISSLEPEDFAVYYCQQRSNWPLTFGGGTKVEIK

SEQ ID NO: 1835 - protein, 107 aa, Artificial Sequence
  Synthetic Polypeptide
DIQMTQSPSSLSASVGDRVTITCRASSSVSYMHWYQQKPGKAPKPLIYAPSNLASGVPSRFSGSGSGTDFTLTISSLQPEDFATYYCQQWSFNPPTFGQGTKVEIKR

SEQ ID NO: 1836 - protein, 106 aa, Artificial Sequence
  Synthetic Polypeptide
DIQLTQSPSSLSASVGDRVTMTCRASSSVSYIHWFQQKPGKAPKPWIYATSNLASGVPVRFSGSGSGTDYTFTISSLQPEDIATYYCQQWTSNPPTFGGGTKLEIK

SEQ ID NO: 1837 - protein, 111 aa, Artificial Sequence
  Synthetic Polypeptide
STVMTQSPDSLAVSLGERATINCKSSQSNSNDVAWYQQKPGQSPKVLIYFASNRYSGVPDRFSGSGYGTDFTLTISSLQAEDVAVYFCQQDYSSPLTFGAGTKLELKRADA

SEQ ID NO: 1838 - protein, 111 aa, Artificial Sequence
  Synthetic Polypeptide
QIVLSQSPAILSASPGEKVTMTCRASSSVSYMHWYQQKPGSSPKPWIYATSNLASGVPARFSGSGSGTSYSFTISRVEAEDAATYYCQQWTFNPPTFGGGTRLEIKRTVAA

SEQ ID NO: 1839 - protein, 107 aa, Artificial Sequence; identical to SEQ ID NO: 1835
  Synthetic Polypeptide

SEQ ID NO: 1840 - protein, 106 aa, Artificial Sequence
  Synthetic Polypeptide
EIVLTQSPSSLSASVGDRVTITCRASSSLSFMHWYQQKPGKAPKPWIYATSNLASGVPSRFSGSGSGTDYTLTISSLQPEDFATYFCHQWSSNPLTFGGGTKVEIK

SEQ ID NO: 1841 - protein, 107 aa, Artificial Sequence; identical to SEQ ID NO: 1830
  Synthetic Polypeptide

SEQ ID NO: 1842 - protein, 107 aa, Artificial Sequence
  Synthetic Polypeptide
EIVLTQSPGTLSLSPGERATLSCRASSSVPYIHWYQQKPGQAPRLLIYATSALASGIPDRFSGSGSGTDFTLTISRLEPEDFAVYYCQQWLSNPPTFGQGTKLELKR

SEQ ID NO: 1843 - protein, 113 aa, Artificial Sequence
  Synthetic Polypeptide
DIQMTQSPSSLSASVGDRVTITCRSSQSIVHSVGNTFLEWYQQKPGKAPKLLIYKVSNRFSGVPSRFSGSGSGTDFTLTISSLQPEDFATYYCFQGSQFPYTFGQGTKVEIKR

SEQ ID NO: 1844 - protein, 108 aa, Artificial Sequence
  Synthetic Polypeptide
DIVMTQSPSSLSASVGDRVTITCKASQSVTNDVAWYQQKPGKAPKLLIYYASNRYTGVPSRFSGSGSGTDFTLTISSLQPEDFATYYCQQDYRSPWTFGGGTKVEIKR

SEQ ID NO: 1845 - protein, 107 aa, Artificial Sequence
  Synthetic Polypeptide
DIQMTQSPSSLSASVGDRVTITCRASQTIWSYLNWYQQRPGKAPNLLIYAASSLQSGVPSRFSGRGSGTDFTLTISSLQAEDFATYYCQQSYSIPQIFGQGTKLEIK

SEQ ID NO: 1846 - protein, 110 aa, Artificial Sequence
  Synthetic Polypeptide
EIVLTQSPGTLSLSPGERATLSCRASQSVGGYLAWYQQKPGQAPRLLIYDASNRATGIPARFSGSGSGTDFTLTISSLEPEDFAVYYCQQRNNWPPMYTFGQGTKLEIKR

SEQ ID NO: 1847 - protein, 112 aa, Artificial Sequence
  Synthetic Polypeptide
DIQMTQSPATIENTSLSASVGDRVTITCRASQGISSWLTWYQQKPEKAPKSLIYAASSLQSGVPSRFSGSGSGTDFTLTISSLQPEDFATYYCQQYDSYPITFGQGTRLEIK

SEQ ID NO: 1848 - protein, 112 aa, Artificial Sequence
  Synthetic Polypeptide
DEIVLTQSPDSLAVSLGERATINCKASQSVDFDGDSYLNWYQQKPGQPPKVLIYAASTLQSGVPSRFSGSGSGTDFTLTINSLEAEDAATYYCQQSNEDPWTFGGGTKVEIK

SEQ ID NO: 1849 - protein, 107 aa, Artificial Sequence
  Synthetic Polypeptide
DIQMTQSPSSLSASVGDRVTITCRASQGISSWLAWYQQKPEKAPKSLIYAASSLQSGVPSRFSGSGSGTDFTLTISSLQPEDFATYYCQQYNSYPPTFGGGTKVEIK

SEQ ID NO: 1850 - protein, 112 aa, Artificial Sequence
  Synthetic Polypeptide
DVVMTQSPLSLPVTLGQPASISCRSSQSIVHSDGNTYLEWYQQRPGQSPRRLIYKVSNRFSGVPDRFSGSGSGTDFTLKISRVEAEDVGVYYCFQGSHAPWTFGGGTKVEIK

SEQ ID NO: 1851 - protein, 106 aa, Artificial Sequence
  Synthetic Polypeptide
QIVLTQSPALMSASPGEKVTMTCSASSSVRYMYWYQQKPRSSPKPWIHLTSNLASGVPARFSGSGSGTSYSLTISSMEAEDAATYYCQQWSSHPFTFGSGTKLEIK

SEQ ID NO: 1852 - protein, 113 aa, Artificial Sequence
  Synthetic Polypeptide
EIVLTQSPGSLAVSPGERVTMSCKSSQSVFFSSSQKNYLAWYQQIPGQSPRLLIYWASTRESGVPDRFTGSGSGTDFTLTISSVQPEDLAIYYCHQYLSSRTFGQGTKLEIKR

SEQ ID NO: 1853 - protein, 114 aa, Artificial Sequence
  Synthetic Polypeptide
DDIVMTQSPDSLTVSLGERTTINCKSSQSVLDSSKNKNSLAWYQQKPGQPPKLLLSWASTRESGIPDRFSGSGSGTDFTLTIDSLQPEDSATYYCQQSAHFPITFGQGTRLEIK

SEQ ID NO: 1854 - protein, 111 aa, Artificial Sequence
  Synthetic Polypeptide
DIQLTQSPSSLSASVGDRVTITCRASQGISSVLAWYQQKPGKAPKLLIYDASSLESGVPSRFSGSGSGTDFTLTISSLQPEDFATYYCQQFNSSITFGQGTKLEIKRTVAA

SEQ ID NO: 1855 - protein, 107 aa, Artificial Sequence
  Synthetic Polypeptide
DIVMTQSPSSLSASLGGKVTITCKASQDINKYIAWYQHKPGKGPRLLIHYTSTLQPGIPSRFSGSGSGRDYSFSISNLEPEDIATYYCLQYDNLLTFGAGTKLELKR

SEQ ID NO: 1856 - protein, 107 aa, Artificial Sequence
  Synthetic Polypeptide
DIQMTQSPSSLSASVGDRVTINCKASQDINSYLSWFQQKPGKAPKTLIYRANRLVDGVPSRFSGSGSGQDYTLTISSLQPEDFATYYCLQYDEFPLTFGGGTKVEIK

SEQ ID NO: 1857 - protein, 112 aa, Artificial Sequence
  Synthetic Polypeptide
EIVLTQSPLSLPVTPGEPASISCRSSQSLLHSNGYNYLDWYLQKPGQSPQLLIYLGVNSVSGVPDRFSGSGSGTDFTLKISRVEAEDVGVYYCMQALQTPWTFGQGTKVEIK

SEQ ID NO: 1858 - protein, 111 aa, Artificial Sequence
  Synthetic Polypeptide
DIQMTQSPASLTVSLGQRATISCRASESVDSYGNSYLHWYQQKPGQPPQLLIYLASNLESGVPARFSGSGSRTDFTLTIDPVEADDAATYYCQQNNEDPWTFGGGTKVEIK

SEQ ID NO: 1859 - protein, 107 aa, Artificial Sequence
  Synthetic Polypeptide
DIQMTQSPSSLSASVGDRVTITCRASQGIRNDLGWYQQKPGKAPKRLIYAASSLQSGVPSRFSGSGSGTEFTLTISSLQPEDFATYYCLQHNSYPWTFGQGTKLEIK

SEQ ID NO: 1860 - protein, 114 aa, Artificial Sequence
  Synthetic Polypeptide
DVLLTQSPLSLPVTLGQPASISCRSSQTIVHSNGNTYLEWFQQRPGQSPRLLIYQVSNRFSGVPDRFSGSGSGTDFTLKISRVEAEDVGVYYCFQGSHVPRTFGGGTKVEIKRA

SEQ ID NO: 1861 - protein, 113 aa, Artificial Sequence
  Synthetic Polypeptide
DVLLTQSPLSLPVTLGQPASISCRSSQTIVHSNGNTYLEWFQQRPGQSPRLLIYQVSNRFSGVPDRFSGSGSGTDFTLKISRVEAEDVGVYYCFQGSHVPRTFGGGTKVEIKR

SEQ ID NO: 1862 - protein, 106 aa, Artificial Sequence
  Synthetic Polypeptide
EIVLTQSPATLSLSPGERATLSCSASSSINYIYWLQQKPGQAPRILIYLTSNLASGVPARFSGSGSGTDFTLTISSLEPEDFAVYYCLQWSSNPLTFGGGTKVEIK

SEQ ID NO: 1863 - protein, 108 aa, Artificial Sequence
  Synthetic Polypeptide
HIVLTQSPSSLSASLGDRVTISCRASQDISTYLNWYQQKPDGTVKLLIFYTSRLHAGVPSRFSGSGSGTHHSLTISNLEQEDIATYFCQQGNSLPFTFGSGTKLEIKR

SEQ ID NO: 1864 - protein, 109 aa, Artificial Sequence
  Synthetic Polypeptide
DHIVLTQSPSSLSASLGDRVTISCRASQDISTYLNWYQQKPDGTVKLLIFYTSRLHAGVPSRFSGSGSGTHHSLTISNLEQEDIATYFCQQGNSLPFTFGSGTKLEIKR

SEQ ID NO: 1865 - protein, 112 aa, Artificial Sequence
  Synthetic Polypeptide
DIVMTQSPDSLAVSLGERATINCRASKSVSTSGYSFMHWYQQKPGQPPKLLIYLASNLESGVPDRFSGSGSGTDFTLTISSLQAEDVAVYYCQHSREVPWTFGQGTKVEIKR

SEQ ID NO: 1866 - protein, 113 aa, Artificial Sequence
  Synthetic Polypeptide
DIVMTQTPLTLSVTIGQPASISCKSSQSLLDSDGKTYLNWLLQRPGQSPERLIYLVSKLDSGVPDRFTGSGSGTDFTLKISRVEAEDLGVYCCWQGTHFPYTFGGGTKVEIKG

SEQ ID NO: 1867 - protein, 113 aa, Artificial Sequence
  Synthetic Polypeptide
DDIQLTQSPSSLSASVGDRVTITCKASQSVDYEGDSFLNWYQQKPGKAPKLLIYAASNLESGVPSRFSGSGSGTDFTLTISSLQPEDFATYYCQQSNEDPLTFGQGTKVEIKR

SEQ ID NO: 1868 - protein, 112 aa, Artificial Sequence
  Synthetic Polypeptide
DIVMTQTPLSLSVTPGQPASISCKSSQSLLDGDGKTYLNWLLQKPGQSPQRLIYLVSKLDSGVPDRFSGSGSGTDFTLKISRVEAEDVGVYYCWQGTHFPRTFGQGTKLEIK

SEQ ID NO: 1869 - protein, 114 aa, Artificial Sequence
  Synthetic Polypeptide
DIVMSQSPSSLAVSVGEKVTMSCKSSQSLLHSSNQKNYLAWYQQKPGQSPKVLIYWASTRESGVPDRFTGSGSGTDFTLTITSVKSEDLAVYYCQQYYSYPWTFGGGTRLEIKR

SEQ ID NO: 1870 - protein, 109 aa, Artificial Sequence
  Synthetic Polypeptide
EIVLTQSPGTLSLSPGERATLSCRASQSVSSSYLAWYQQKPGQAPRLLIYGTSSRATGIPDRFSGSGSGTDFTLTISRLEPEDFAVYYCQQYGSSPFTFGGGTKVEIKR

SEQ ID NO: 1871 - protein, 108 aa, Artificial Sequence
  Synthetic Polypeptide
DIQMTQSPSSLSASVGDRVTITCRASQSISLWLNWYQQKPGKAPKLLIYAASTLQSGVPSRFSGSGSGTDFTLTISSLQPEDFATYYCQQYYTSPYTFGQGTKVEIKR

SEQ ID NO: 1872 - protein, 109 aa, Artificial Sequence
  Synthetic Polypeptide
DIQMTQSPSSLSASVGDRVTITCRASQSISSYLNWYQQKPGKAPKLLIYAVSTLQSGVPSRFSGSGSGTDFTLTISSLQPEDFATYYCQQSGTFPPTTFGQGTKVEIKR

SEQ ID NO: 1873 - protein, 106 aa, Artificial Sequence
  Synthetic Polypeptide
QSPSSLAVSAGEKVTMSCKSSQSLLNSRTRKNYLAWYQQKPGQSPKLLIYWASTRESGVPDRFTGSGSGTDFTLTISSVQAEDLAVYYCKQSNLYTFGGGTKLEIK

SEQ ID NO: 1874 - protein, 104 aa, Artificial Sequence
  Synthetic Polypeptide
MTQSPKFLLVSAGDRVTLTCKASQSVNNDVYWYQQEPGQSPKLLIYWASTRESGVPDRFTGSGSGTDFTLTISSVQAEDLAVYYCKQSYNLYTFGGGTKLEIKR

SEQ ID NO: 1875 - protein, 107 aa, Artificial Sequence
  Synthetic Polypeptide
DIQMTQSPSSLSASLGERVSLTCRATQELSGYLSWLQQKPDGTIKRLIYAASTLDSGVPKRFSGNRSGSDYSLTISSLESEDFADYYCLQYAIYPYTFGGGTKLEIK

SEQ ID NO: 1876 - protein, 112 aa, Artificial Sequence
  Synthetic Polypeptide
DTIVLTQSPASLAVSLGQRATISCRASESVDSYGNSFMHWYQQKPGQPPKLLIYLASNLESGVPARFSGSGSRTDFTLTIDPVEADDAATYYCQQNNYDPWTFGGGTKLEIK

SEQ ID NO: 1877 - protein, 106 aa, Artificial Sequence
  Synthetic Polypeptide
DIQMTQSPSSLSASVGDRVTITCKASQDVSTAVAWFQQKPGKAPKLLIYSPSYRYTGVPSRFSGSGSGTDFTLTISSLQPEDFTYYCQQLYSTPYTFGQGTKVEIK

SEQ ID NO: 1878 - protein, 111 aa, Artificial Sequence
  Synthetic Polypeptide
DIQMTQSPSSLSASVGDRVTITCRASQSVSTSSYNYMHWYQQKPGKPPKLLIKYASNLESGVPSRFSGSGSGTDFTLTISSLQPEDFATYYCQHSWEIPLTFGQGTKVEIK

SEQ ID NO: 1879 - protein, 108 aa, Artificial Sequence
  Synthetic Polypeptide
EIVLTQSPATLSASPGERVTLTCRASSNVISSYVHWYQQKPGSSPRLFLYSTSNLASGVPSRFSGSGSGTDFTFTISSLEAEDAATYYCQQYSGYPLTFGQGTRLEIK

SEQ ID NO: 1880 - protein, 108 aa, Artificial Sequence
  Synthetic Polypeptide
EIVLTQSPATLSLSPGERATLSCRASSNVISSYVHWYQQKPGQAPRLLIYSTSNLASGIPARFSGSGSGTDFTLTISSLEPEDFAVYYCQQYSGYPLTFGQGTRLEIK

SEQ ID NO: 1881 - protein, 120 aa, Artificial Sequence
  Synthetic Polypeptide
LNFMLTQPHSVSGSPGKTVTISCTRSTGSITSNYVHWYQQRPGSSPTTVICEDNERPSGVPDRFSGSIDISSNSASLTISGLKTEDEADYYCQSYDDSNHISVFGTGTKVTVLGQPKANP

SEQ ID NO: 1882 - protein, 107 aa, Artificial Sequence
  Synthetic Polypeptide
DIQMTQSPSSLSASVGDRVTITCKASQDVGIAVAWYQQKPGKVPKLLIYWASTRHTGVPDRFSGSGSGTDFTLTISSLQPEDVATYYCQQYSSYPYTFGQGTKVEIK

SEQ ID NO: 1883 - protein, 108 aa, Artificial Sequence
  Synthetic Polypeptide
DIQMTQSPSSLSASVGDRVTITCKASQDVGIAVAWYQQKPGKVPKLLIYWASTRHTGVPDRFSGSGSGTDFTLTISSLQPEDVATYYCQQYSSYPYTFGQGTKVEIKR

SEQ ID NO: 1884 - protein, 107 aa, Artificial Sequence; identical to SEQ ID NO: 1882
  Synthetic Polypeptide

SEQ ID NO: 1885 - protein, 107 aa, Artificial Sequence
  Synthetic Polypeptide
DIVMTQSQKSMSTSVGDRVSITCKASQDVITGVAWYQQKPGQSPKLLIYSASYRYTGVPDRFTGSGSGTDFTFTISNVQAEDLAVYYCQQHYSTPLTFGAGTKLELK

SEQ ID NO: 1886 - protein, 109 aa, Artificial Sequence
  Synthetic Polypeptide
DIQMTQSPSSLSASVGDRVTITCKASQDVSTAVAWYQQKPGKAPKLLIYSASYRYTGVPDRFTGSGSGTDFTLTISSLQPEDFATYYCQQHYSTPPYTFGGGTKVEIKR

SEQ ID NO: 1887 - protein, 113 aa, Artificial Sequence
  Synthetic Polypeptide
DVVMTQTPLSLSVTPGQPASISCRSSQSLVHNNGNTYLHWYLQKPGQSPQLLIYKVSNRFSGVPDRFSGSGSGTDFTLKISRVEAEDVGVYFCSQSTHVPPYTFGGGTKVEIK

SEQ ID NO: 1888 - protein, 113 aa, Artificial Sequence
  Synthetic Polypeptide
DVVMTQTPLSLSVTPGQPASISCRSSQSLVHSNGLTYLHWYLQKPGQSPQLLIYKVSNRFSGVPDRFSGSGSGTDFTLKISRVEAEDVGVYFCSQSTHVPPFTFGGGTKVEIK

SEQ ID NO: 1889 - protein, 113 aa, Artificial Sequence
  Synthetic Polypeptide
DVVMTQSPLSLPVTPGEPASISCRSSQSLVHSNGNTYLHWYLQKPGQSPQLLIYKVSNRFSGVPDRFSGSGSGTDFTLKISRVEAEDVGVYFCSQSTHVPPFTFGGGTKVEIK

SEQ ID NO: 1890 - protein, 107 aa, Artificial Sequence
  Synthetic Polypeptide
DIQMTQSSSYLSVSLGGRVTITCKASDHINNWLAWYQQKPGNAPRLLISGATSLETGVPSRFSGSGSGKDYTLSITSLQTEDVATYYCQQYWSTPWTFGGGTKLEIK

SEQ ID NO: 1891 - protein, 108 aa, Artificial Sequence
  Synthetic Polypeptide
DIVMTQSHKFMSTSVGDRVSITCKASQDVSTAVAWYQQKPGQSPKLLIYSASYRYTGVPDRFTGSGSGTDFTFTISSVQAEDLAVYYCQQHYSTPPYTFGGGTKLEIK

SEQ ID NO: 1892 - protein, 113 aa, Artificial Sequence
  Synthetic Polypeptide
QSVLTQPPSVSGAPGQRVTISCTGSGSNIGAPYDVSWYQQLPGTAPKLLIYHNNKRPSGVPDRFSGSKSGTSASLAITGLQAEDEADYYCQSYDSSSISTIFGGGTKLTVLGA

SEQ ID NO: 1893 - protein, 113 aa, Artificial Sequence
  Synthetic Polypeptide
QSVLTQPPSVSGAPGQRVTISCTGSGSNIGAPYDVSWYQQLPGTAPKLLIYHNNKRPSGVPDRFSGSKSGTSASLAITGLQAEDEADYYCATVEAGLSGSVFGGGTKLTVLGA

SEQ ID NO: 1894 - protein, 107 aa, Artificial Sequence
  Synthetic Polypeptide
DIQMTQSPSSLSASVGDRVTITCSASSSVSYMYWYQQKPGKAPKLLIYLTSNLASGVPSRFSGSGSGTDFTLTISSLQPEDFATYYCQQWRSNPFTFGQGTKLEIKR

SEQ ID NO: 1895 - protein, 108 aa, Artificial Sequence
  Synthetic Polypeptide
EIVMTQSPATLSVSPGERATLSCKASQSVSNDVVWYQQKPGQAPRLLIYYASNRYTGIPARFSGSGSGTEFTLTISSLQSEDFAVYYCQQDYTSPWTFGQGTKLEIKR

SEQ ID NO: 1896 - protein, 111 aa, Artificial Sequence
  Synthetic Polypeptide
STDIQMTQSPSSLSASVGDRVTITCRASQSISSYLNWYQQKPGKAPKLLIYLASNLQSGVPSRFSGSGSGTDFTLTISSLQPEDFATYYCQQAEYMPLTFGQGTKVEIKRA

SEQ ID NO: 1897 - protein, 107 aa, Artificial Sequence
  Synthetic Polypeptide
DILLTQSPVILSVSPGERVSFSCRASQSIGTNIHWYQQRTNGSPRLLIKYASESISGIPSRFSGSGSGTDFTLSINSVESEDIADYYCQQNNNWPTTFGAGTKLELK

SEQ ID NO: 1898 - protein, 111 aa, Artificial Sequence
  Synthetic Polypeptide
DIQMTQSPSSLSASVGDRVTITCRSSQNIVHSNGNTYLDWYQQTPGKAPKLLIYKVSNRFSGVPSRFSGSGSGTDFTFTISSLQPEDIATYYCFQYSHVPWTFGQGTKLQI

SEQ ID NO: 1899 - protein, 105 aa, Artificial Sequence
  Synthetic Polypeptide
DIQMTQSPSSLSASVGDRVTITCRASQGIRNNLAWYQQKPGKAPKRLIYAASNLQSGVPSRFTGSGSGTEFTLIVSSLQPEDFATYYCLQHHSYPLTSGGGTKVE

SEQ ID NO: 1900 - protein, 112 aa, Artificial Sequence
  Synthetic Polypeptide
DVVMTQSPDSLAVSLGERATINCKSSQSLLDSDGKTYLNWLQQKPGQPPKRLISLVSKLDSGVPDRFSGSGSGTDFTLTISSLQAEDVAVYYCWQGTHFPGTFGGGTKVEIK

SEQ ID NO: 1901 - protein, 107 aa, Artificial Sequence
  Synthetic Polypeptide
ELQMTQSPSSLSASVGDRVTITCRASQSISSYLNWYQQKPGQPPKLLIYWASTRESGVPDRFSGSESGTNYTLTISSLQPEDFATYFCQQSDSLPITFGQGTRLDIQ

SEQ ID NO: 1902 - protein, 113 aa, Artificial Sequence
  Synthetic Polypeptide
ELVMTQSPSSLTVTAGEKVTMSCKSSQSLLNSGNQKNYLTWYQQKPGQPPKLLIYWASTRESGVPDRFTGSGSGTDFTLTISSVQAEDLAVYYCQNDYSYPLTFGAGTKLEIK

SEQ ID NO: 1903 - protein, 112 aa, Artificial Sequence
  Synthetic Polypeptide
DVVMTQTPLSLPVSLGDQASISCRSSQSLVHSNGNTYLRWYLQKPGQSPKVLIYKVSNRFSGVPDRFSGSGSGTDFTLKISRVEAEDLGVYFCSQSTHVPWTFGGGTKLEIK

SEQ ID NO: 1904 - protein, 112 aa, Artificial Sequence
  Synthetic Polypeptide
DVVMTQTPLSLPVSLGDQASISCRSSQSLVHSNGNTYLRWYLQKPGQSPKVLIYKVSNRVSGVPDRFSGSGSGTDFTLKINRVEAEDLGVYFCSQSTHVPWTFGGGTKLEIK

SEQ ID NO: 1905 - protein, 110 aa, Artificial Sequence [sequence omitted]

SEQ ID NO: 1906 - protein, 107 aa, Artificial Sequence
  Synthetic Polypeptide
DIQMTQSPSSLSASVGDRVTITCRASQSISSYLNWYQQKPGKAPKLLIYAASSLQSGVPSRFSGSGSGTDFTLTISSLQPEDLATYYCQQSYSTPFTFGPGTKVDIK

SEQ ID NO: 1907 - protein, 103 aa, Artificial Sequence
  Synthetic Polypeptide
YIHVTQSPSSLSVSIGDRVTINCQTSQGVGSDLHWYQHKPGRAPKLLIHHASSVEDGVPSRFSGTGFHTSFNLTINDLQADDIGTYYCQVLQSFGRGSRLDTK

SEQ ID NO: 1908 - protein, 112 aa, Artificial Sequence
  Synthetic Polypeptide
DIVLTQSPLSLAVSLGQPAIISCKASQSVSFAGTSLMHWYHQKPGQQPRLLIYRASNLEAGVPDRFSGSGSKTDFTLTISPVEAEDAATYYCQQSREYPYTFGGGTKLEIKR

SEQ ID NO: 1909 - protein, 109 aa, Artificial Sequence
  Synthetic Polypeptide
LETTLTQSPATLSVSPGERVTLSCRASQSVGSNLAWYQQKFGQAPRLLIYDASTRATGIPARFSGSGSGTEFTLTISRLEPEDFAVYYCHQYGSSPRTFGQGTKVDIKR

SEQ ID NO: 1910 - protein, 113 aa, Artificial Sequence
  Synthetic Polypeptide
DVVMTQTPLSLPVTPGEPASISCRSSQSLVHRNGNTYLHWYLQKPGQSPKLLIHKVSNRFSGVPDRFSGSGSGTDFTLKISRVEAEDLGVYFCSQSTHVPPLTFGAGTKLELK

SEQ ID NO: 1911 - protein, 105 aa, Artificial Sequence
  Synthetic Polypeptide
EIVMTQTPATLSVSAGERVTITCKASQSVSNDVTWYQQKPGQAPRLLIYSASNRYSGVPARFSGSGYGTEFTFTISSVQSEDFAVYFCQQDYSSFGQGTKLEIKR

SEQ ID NO: 1912 - protein, 108 aa, Artificial Sequence
  Synthetic Polypeptide
DIQMTQTASSLPASLGDRVTISCSASQDISNYLNWYQQKPDGTVKLLIFYSSNLHSGVPSRFSGGGSGTDYSLTISNLEPEDIATYFCHQYSKLPWTFGGGTKLEIKR

SEQ ID NO: 1913 - protein, 111 aa, Artificial Sequence
  Synthetic Polypeptide
QFVLTQSPSVSAALGASAKLTCTLSSAHKTYTIDWYQQQQGEAPRYLMQVKSDGSYTKGTGVPDRFSGSSSGADRYLIIPSVQADDEAGYVCGADDNGGYVFGGGTQLTVT

SEQ ID NO: 1914 - protein, 111 aa, Artificial Sequence; identical to SEQ ID NO: 1913
  Synthetic Polypeptide

SEQ ID NO: 1915 - protein, 111 aa, Artificial Sequence
  Synthetic Polypeptide
QFVLTQSPSASAALGASAKLTCTLSSAHKTYTIDWYQQQKGKAPRYLIQVKSDGTYTKATGVPDRFSGSSSGADRYLIIPSVQADDEADYYCGTDYTGGYVFGGGTQLTVT

SEQ ID NO: 1916 - protein, 107 aa, Artificial Sequence; identical to SEQ ID NO: 1849
  Synthetic Polypeptide

SEQ ID NO: 1917 - protein, 107 aa, Artificial Sequence; identical to SEQ ID NO: 1849
  Synthetic Polypeptide

SEQ ID NO: 1918 - protein, 112 aa, Artificial Sequence
  Synthetic Polypeptide
NFMLTQPHSVSESPGKTVTISCTGSGGSIDNNYVHWYQQRPGSAPTTVMFEDNQRPSGVPDRFSGSIDSSSNSASLVISGLKTEDEGDYYCQSSDGSKVVFGGGTKLTVLGQ

SEQ ID NO: 1919 - protein, 107 aa, Artificial Sequence
  Synthetic Polypeptide
NIELTQSPAIMSASPGERVTMTCSASSSIRYIYWYQQKPGSSPRLLIYDTSNVAPGVPFRFSGSGSGTSYSLTINRMEAEDAATYYCQEWSGYPYTFGGGTKLDIKR

SEQ ID NO: 1920 - protein, 112 aa, Artificial Sequence
  Synthetic Polypeptide
DVVMTQTPLSLPVSLGDQASISCRSSQSLVHSNGNTYLHWYLQKPGQSPKLLIYKVSNRFSGVPDRFSGSGSGTDFTLKISRVEAEDLGVYFCSQNTPVPPKFGSGTKLEIK

SEQ ID NO: 1921 - protein, 107 aa, Artificial Sequence
  Synthetic Polypeptide
DIQLTQSPSSLSASVGDRVTITCRASQGIRNDLGWYQQKPGKAPKRLIYAASSLQNGVPSRFSGSGSGTEFTLTISSLQPEDFATYYCLQHNTYPAFGQGTKVEIKR

SEQ ID NO: 1922 - protein, 111 aa, Artificial Sequence
  Synthetic Polypeptide
QSVVTQPPSMSAAPGQQVTISCSGGNSNIERNYVSWYLQLPGTAPKLVIFDNDRRPSGIPDRFSGSKSGTSATLGITGLQTGDEADYYCGTWDSSLRGWVFGGGTKLTVLG

SEQ ID NO: 1923 - protein, 111 aa, Artificial Sequence
  Synthetic Polypeptide
QSVLTQPPSASGTPGQRVTISCSGSRSNVGGNYVFWYQQVPGATPKLLIYRSNQRPSGVPDRFAGSKSGSSASLAISGLRSEDEADYYCATWDDSLSGFVFGTGTKVTVLG

SEQ ID NO: 1924 - protein, 113 aa, Artificial Sequence
  Synthetic Polypeptide
QSVVTQPPSVSGAPGQRVTISCTGSSSNIGAGYDVHWYQQLPGTAPKLLIYGNSNRPSGVPDRFSGSKSGTSASLAITGLQAEDEADYYCQSYDSSLSGSYVFGTGTKLTVLG

SEQ ID NO: 1925 - protein, 111 aa, Artificial Sequence
  Synthetic Polypeptide
QSVVTQPASVSGSPGQSITISCTGTSSDVGGYNYVSWYQQHPGKAPKLMIYDVSKRPSGVSNRFSGSKSGNTASLTISGLQAEDEADYYCSSYTSSSTLVFGGGTKLTVLG

SEQ ID NO: 1926 - protein, 107 aa, Artificial Sequence
  Synthetic Polypeptide
DIQMTQSPSSLSASVGDRVTITCRASQDVNTAVAWYQQKPGKAPKLLIYSASFLESGVPSRFSGSRSGTDFTLTISSLQPEDFATYYCQQHYTTPPTFGQTKVEIKR

SEQ ID NO: 1927 - protein, 105 aa, Artificial Sequence
  Synthetic Polypeptide
DIQMTQSPSSLSASVGDTVTITCQANGYLNWYQQRRGKAPKLLIYDGSKLERGVPSRFSGRRWGQEYNLTINNLQPEDIATYFCQVYEFVVPGTRLDLKRTVAAP

SEQ ID NO: 1928 - protein, 107 aa, Artificial Sequence
  Synthetic Polypeptide
QSVLTQPPSVSVAPGKTARIPCEGNYIGSSNVHWYQQKPGQAPVLVIHFDSDRPSGIPDRFSGSNSGNMATLTISRVEAGDEADYYCQVWENHGWVFGGGTKLTVLS

SEQ ID NO: 1929 - protein, 105 aa, Artificial Sequence
  Synthetic Polypeptide
QSALTQPPSASGSPGQSITISCTGTSNNFVSWYQQHAGKAPKLVIYDVNKRPSGVPDRFSGSKSGNTASLTVSGLQTDDEAVYYCGSLVGNWDVIFGGGTKLTVL

SEQ ID NO: 1930 - protein, 104 aa, Artificial Sequence
  Synthetic Polypeptide
EIVLTQSPGTLSLSPGETAIISCRTSQYGSLAWYQQRPGQAPRLVIYSGSTRAAGIPDRFSGSRWGPDYNLTISNLESGDFGVYYCQQYEFFGQGTKVQVDIKR

SEQ ID NO: 1931 - protein, 107 aa, Artificial Sequence
  Synthetic Polypeptide
ELVLTQSPGTLSLSAGERATLSCRASQSVSSGSLAWYQQKPGQAPRLLIYGASTRATGIPDRFSGSGSGTDFTLTIGRLEPEDLAVYYCQQYGTSPYTFGQGTKLEI

SEQ ID NO: 1932 - protein, 108 aa, Artificial Sequence
  Synthetic Polypeptide
DVVMTQSPSSLSASVGDRVTITCQSSLDISHYLNWYQQKPGKAPKLLIYDASNLETGVPSRFSGSGSGTHFTFTISSLQPEDFATYYCQQYDNLPLTFGGGTKLEIKR

SEQ ID NO: 1933 - protein, 108 aa, Artificial Sequence
  Synthetic Polypeptide
DIVMTQSQDSMATSVGERVTVNCKASQNVDTNVAWYQQKPGQSPEPLLFSASYRYTGVPDRFSGSGSGTDFTLTISSVQAEDVAEYFCQQYNSYPLTFGQGTKLEIKR

SEQ ID NO: 1934 - protein, 113 aa, Artificial Sequence
  Synthetic Polypeptide
SYELTQPPSVSGTPGQRVAISCSGSSSNIGTRMVTWYQHVPGTAPKLLIFNNNQRPSGVPDRFSASKSGTSASLAIIGLQSDDEADYYCATWDDNVKSYVFGTGTKVTVLGSR

SEQ ID NO: 1935 - protein, 110 aa, Artificial Sequence
  Synthetic Polypeptide
QSVLTQPPSLSVAPGKTASITCGGNNIGMKSVHWYQQRPGQAPVLVIYYDSDRPSGIPGRFSGSNSGNTATLTISRVEAGDEADYYCQVWDTTGDHPGYVFGTGTKVTVL

SEQ ID NO: 1936 - protein, 109 aa, Artificial Sequence
  Synthetic Polypeptide
EIVLTQSPATLSLSPGERATLSCRASQSVGSYLAWYQQKPGAPRLLIYDASHRATGIPARFSGSGSGTDFTLTISSLEPEDFAVYYCQQRSNWPPMYTFGQGTKLEIKR

SEQ ID NO: 1937 - protein, 113 aa, Artificial Sequence
  Synthetic Polypeptide
EIVLTQSPLSLPVTPGEPASISCRSSQSLLHSNGYNYLDWYLQKPGQSPQLLIYLGSNRASGVPDRFSGSGSGTDFTLKISRVEAEDVGVYYCMQALQTPRTFGQGTKVEIKR

SEQ ID NO: 1938 - protein, 97 aa, Artificial Sequence
  Synthetic Polypeptide
DIQMTQSPSSLSASVGDRVTITCQASQDINNYLNWYQQKPGKAPKLLIYDASNLQTGVPSRFSGSGSGTDFTFTIEDIATYYCQQYTFGPGTKVDIK

SEQ ID NO: 1939 - protein, 109 aa, Artificial Sequence
  Synthetic Polypeptide
DIQMTQSPSSLSASVGDRVTITCTASLSVSSTYLHWYQQKPGSSPKLWIYSTSNLASGVPSRFSGSGSGTSYTLTISSLQPEDFATYYCHQYHRSPLTFGGGTKVEIKR

SEQ ID NO: 1940 - protein, 107 aa, Artificial Sequence
  Synthetic Polypeptide
DIQMTQSPSSLSASVGDRVTITCKASQDVGTAVAWYQQKPGKAPKLLIYSASYRSTGVPSRFSGSGSGTDFTLTISSLQPEDFATYYCQHHYSAPWTFGGGTKVEIK

SEQ ID NO: 1941 - protein, 119 aa, Artificial Sequence
  Synthetic Polypeptide
QVQLQESGPGLVKPSETLSLTCAVSGYSISDDHAVSWVRQPPGEGLEWIGFISYSGITNYNPTLQDRVTISRDNSKNTLYLQMNSLRAEDTAVYYCARLLARATAMDVWGEGTLVTVSS

SEQ ID NO: 1942 - protein, 103 aa, Artificial Sequence
  Synthetic Polypeptide
DIQMTQSPSSLSASVGDRVTITCRTSQSLSSYTHWYQQKPGKAPKLLIYAASSRGSGVPSRFSGSGSGTDFTLTISSLQPEDFATYYCQQSRTFGQGTKVEIK

SEQ ID NO: 1943 - protein, 106 aa, Artificial Sequence
  Synthetic Polypeptide
IQMTQSSSYLSVSLGGRVTITCKASAHINNWLAWYQQKPGNAPRLLISGATSLETGVPSRFSGSGSGKDYTLSINSLQTEDVATYYCQQYWSLPRTFGGGTRLEIK

SEQ ID NO: 1944 - protein, 113 aa, Artificial Sequence
  Synthetic Polypeptide
DIVMTQSPSSLTMSVGQKVTMSCKSSHSLLNSRNQKNYLAWFQQKPGQSPKLLVYFASTRESGVPDRFIGSGSGTDFTLTISNVQAEDLADYFCQQHYTTLPTFGGGTKLEIK

SEQ ID NO: 1945 - protein, 108 aa, Artificial Sequence
  Synthetic Polypeptide
DIQMTQSFSSLSASVGDRVTITCRASQDISNYLNWYQQKPGKAPKLLIYYTSRLHSGVPSRFSGSGSGTDYTLTISSLQPEDFATYFCQQGNTLPWTFGGGTKLEIKR

SEQ ID NO: 1946 - protein, 107 aa, Artificial Sequence
  Synthetic Polypeptide
DIQMTQSPPSLSASVGGKVTITCKASQDIDRYMAWYQDKPGKGPKLLIHDTSTLQPGIPSRFSGSGSGRDYSFSISNLEPEDIATYYCLQYDNLWTFGGGTKLEIKR

SEQ ID NO: 1947 - protein, 107 aa, Artificial Sequence
  Synthetic Polypeptide
DIQMTQSPASLSASVGETVTITCRVSGNIHNYLAWYQQKQGKSPQLLVYNAKTLADGVPSRFSGSGSGTQYSLKINSLQPEDFGSYYCQHFWSNPYTFGGGTKLEIK

SEQ ID NO: 1948 - protein, 112 aa, Artificial Sequence
  Synthetic Polypeptide
DIQMTQSPSSLSASVGDRVTITCRSSQRIVHSNGNTYLEWYQQTPGKAPKLLIYKVSNRFSGVPSRFSGSGSGTDYTPTISSLQPEDIATYYCFQGSHVPPTFGQGTKLQIT

SEQ ID NO: 1949 - protein, 107 aa, Artificial Sequence
  Synthetic Polypeptide
DIQMTQSPASLSASVGETVTIICRASVNIYSYLAWYQQKQGKSPQLLVYNAKILAEGVPSRFSGSGSGTQFSLKINSLQPEDFGSYYCQHHYGTFTFGSGTKLEIKR

SEQ ID NO: 1950 - protein, 107 aa, Artificial Sequence
  Synthetic Polypeptide
DIVMTQSHKFMSTSVGDRVSVTCKASQNVGNNVAWYQQKPGQSPKVLIYSASYRYSGVPDRFTGSGSGTDFTLTISNVQSEDLAEYFCQQYNTYPFTFGSGTKLEIK

SEQ ID NO: 1951 - protein, 116 aa, Artificial Sequence
  Synthetic Polypeptide
DQSVLTQPPSVSGAPGQRVTISCTGSSSNIGAGYDVHWYQQLPGTAPKLLIYGNSNRPSGVPDRFSGSKSGTSASLAITGLQAEDEADYYCQSYDNSLSSWVFGGGTKLTVLGQPK

SEQ ID NO: 1952 - protein, 115 aa, Artificial Sequence
  Synthetic Polypeptide
DQSVVTQPPSVSAAPGRKVTISCSGSSSNIGSNYVSWYQQVPGTAPKLLIYEDDKRPSGIPDRFSGSKSGTSATLGITGLQTGDEADYFCATWDRTVNVVRFGGGTRLTVHSQPK

SEQ ID NO: 1953 - protein, 108 aa, Artificial Sequence
  Synthetic Polypeptide
DIQMTQSPSSLSASVGDRVTITCRASQSISSYLNWYQQKPGKAPKLLIYAASSLQSGVPSGFSGSGSGTDFTLTISSLQPEDFATYYCQQSYSTPLTFGGGTKVEIKR

SEQ ID NO: 1954 - protein, 108 aa, Artificial Sequence
  Synthetic Polypeptide
DIQMTQSSSSFSVSLGDRVTITCKASEDIYIRLAWYQQKPGNAPRLLISAATSLETGIPSRFSGSGSGEDYTLTITSLQTEDVATYYCQQYWTTPWTFGGGTKLEIKR

SEQ ID NO: 1955 - protein, 107 aa, Artificial Sequence
  Synthetic Polypeptide
DIQMTQSSSSFSVSLGDRVTITCMASEDIYIRLAWYQQKPGNAPRLLISAATSLETGVPSRFSGSGSGKDYTLSITSLQTEDVGTYYCQQYWSSPWTFGGGTKLEIN

SEQ ID NO: 1956 - protein, 107 aa, Artificial Sequence; identical to SEQ ID NO: 1955
  Synthetic Polypeptide

SEQ ID NO: 1957 - protein, 106 aa, Artificial Sequence
  Synthetic Polypeptide
QIVLTQSPAIMSASPGEKVTISCSASSSVSYMYWYQQKPGSSPKPWIYRTSNLASGVPARFSGSGSGTSYSLTISNMEAEDAAAYYCQQYHSYPTTFGGGTKLEVK

SEQ ID NO: 1958 - protein, 112 aa, Artificial Sequence
  Synthetic Polypeptide
DIVMTQAAPSIPVTPGESVSISCRSDKSLLHSNGNTYLFWFLQRPGQSPQLLIYRMSNLASGVPDRFSGSGSGTAFTLRISGVEAEDVGVYYCMQHLEYPYTFGGGTKLEIK

SEQ ID NO: 1959 - protein, 112 aa, Artificial Sequence
  Synthetic Polypeptide
DIVMTQSPLSLPVTPGEPASISCRSSKSLLHSNGNTYLYWFQQKPGQAPRLLIYRMSNLASGVPDRFSGSGSGTAFTLKISRVEAEDVGVYYCMQHIEYPFTFGQGTKLEIK

SEQ ID NO: 1960 - protein, 115 aa, Artificial Sequence
  Synthetic Polypeptide
SSYVLTQPPSVSGSPGQSITISCTGTSSDVGGYNYVSWYQQHPGKAPKLMIYEGSKRPSGVSNRFSGSKSGNTASLTISGLQAEDEADYYCSSYTTRSTRVFGGGTKLTVLGAAA

SEQ ID NO: 1961 - protein, 111 aa, Artificial Sequence
  Synthetic Polypeptide
DIVLTQSPASLAVSLGQSVTISCRASESVEYYGTSLMQWYQQKPGQPPKLLIYGASNVESGVPARFSGSGSGTDFSLNIHPVEEDDIAMYFCQQSRKVPWTFGGGTKLEIK

SEQ ID NO: 1962 - protein, 109 aa, Artificial Sequence
  Synthetic Polypeptide
ETTLTQSPGTLSLSPGERATLSCRASQSVSSSYLAWYQQKPGQAPRLLIYGASSRATGIPDRFSGSGSGTDFTLTISRLEPEDFAVYYCQQYGSSPRTFGQGTKVEIKR

SEQ ID NO: 1963 - protein, 108 aa, Artificial Sequence
  Synthetic Polypeptide
EIVMTQSPATLSLSPGERATLSCRASQSVSSYLAWYQQKPGQAPRLLIYDASNRATGIPARFSGSGSGTDFTLTISSLEPEDFAVYYCHQYGSSPQTFGQGTKVEIKR

SEQ ID NO: 1964 - protein, 113 aa, Artificial Sequence
  Synthetic Polypeptide
DIELTQSPSSLAVSAGEKVTMSCKSSQSLLNSRTRKNQLAWYQQKPGQSPELLIYWASTRQSGVPDRFTGSGSGTDFTLTISSVQAEDLAVYYCQQSYNLLTFGPGTKLEVKR

SEQ ID NO: 1965 - protein, 109 aa, Artificial Sequence
  Synthetic Polypeptide
EIVLTQSPGTLSLSPGERATLSCRASQSVSSSYLAWYQQKPGQAPRLLIYGASSRATGIPDRFSGSGSGTDFTLTISRLEPEDFAVYYCQQYGSSPWTFGQGTKVEIKR

SEQ ID NO: 1966 - protein, 112 aa, Artificial Sequence
  Synthetic Polypeptide
DVVMTQTPLTLSVTIGQPASISCKSSQSLLDSDGKTYLHWLLQRPGQSPKRLIFLVSKLDSGVPDRFTGSGSGTDFTLKISRVEAEDLGVYYCWQGTHFPQTFGGGTKLEIK

SEQ ID NO: 1967 - protein, 110 aa, Artificial Sequence
  Synthetic Polypeptide
DQSELTQPRSVSGSPGQSVTISCTGTERDVGGYNYVSWYQQHPGKAPKLIIHDVIERSSGVPDRFSGSKSGNTASLTISGLQAEDEADYYCWSFAGGYYVFGTGTDVTVL

SEQ ID NO: 1968 - protein, 97 aa, Artificial Sequence
  Synthetic Polypeptide
EIVLTQSPATLSLSPGERATLSCRASQSVSSYLAWYQQKPGQAPRLLIYDASNRATGIPARFSGSGSGTDFTLTIEDFAVYYCQQSTFGQGTKVEIK

SEQ ID NO: 1969 - protein, 107 aa, Artificial Sequence [sequence omitted]

SEQ ID NO: 1970 - protein, 107 aa, Artificial Sequence
  Synthetic Polypeptide
DIQMTQSPSSLSASVGDRVTITCRASQGISSWLAWYQQKPEKAPKSLIYAASSLQSGVPSRFSGSGSGTDFTLTISSLQPEDFATYYCQQYNSYPYTFGQGTKLEIK

SEQ ID NO: 1971 - protein, 108 aa, Artificial Sequence
  Synthetic Polypeptide
DIQMTQSPSSLSASVGDRVTITCRASQDVSTAVAWYQQKPGKAPKLLIYSASFLYSGVPSRFSGSGSGTDFTLTISSLQPEDFATYYCQQYLYHPATFGQGTKVEIKR

SEQ ID NO: 1972 - protein, 112 aa, Artificial Sequence
  Synthetic Polypeptide
AIVMTQTPSPVSAAVGGTVTINCQASESVYSNNYLSWFQQKPGQPPKLLIYLASTLASGVPSRFKGSGSGTQFTLTISGVQCDDAATYYCIGGKSSSTDGNAFGGGTEVVVR

SEQ ID NO: 1973 - protein, 108 aa, Artificial Sequence
  Synthetic Polypeptide
DIVVTQSPASLAVSLGQRATISYRASKSVSTSGYSYMHWNQQKPGQPPRLLIYLVSNLESGVPARFSGSGSGTDFTLNIHPVEEEDAATYYCQHIRELTRSEGGPSWK

SEQ ID NO: 1974 - protein, 106 aa, Artificial Sequence
  Synthetic Polypeptide
QLTQSPSSVSASVGDRVTITCRASRGISSWLAWYQQKPGKAPKLLIYTASSLQSGVPSRFSGSGSGTDFTLTISSLQPEDFATYYCQQAYSFPRTFGQGTKVEIKR

SEQ ID NO: 1975 - protein, 113 aa, Artificial Sequence
  Synthetic Polypeptide
DIVMTQSPLSLPVTPGEPASISCRSSQSLLHSNGYNYLVWYLQKPGQSPQLLIYLGSIRASGVPDRFSGSGSGTDFTLKISRVEAEDVGVYYCMQPLQTPITFGQGTRLEIKR

SEQ ID NO: 1976 - protein, 107 aa, Artificial Sequence
  Synthetic Polypeptide
DIQMTQSPSSLSASVGDRVTITCRASQGISNYLAWYQQKTGKVPKFLIYEASTLQSGVPSRFSGGGSGTDFTLTISSLQPEDVATYYCQNYNSAPFTFGPGTKVDIK

SEQ ID NO: 1977 - protein, 107 aa, Artificial Sequence
  Synthetic Polypeptide
DIQMTQSPSSLSTSVGDRVTLTCKASQDVGTAVDWYQQKPGPSPKLLIYWASTRHTGIPSRFSGSGSGTDFTLTISSLQPEDFADYYCQQYNSYPLTFGPGTKVDIK

SEQ ID NO: 1978 - protein, 103 aa, Artificial Sequence
  Synthetic Polypeptide
DIQMTQSPSSLSASVGDRVTITCKASQDIYPYLNWFQQKPGKAPKTLIYRTNRLLDGVPSRFSGSGSGTDFTFTISSLQPYYCLQYDEFPLTFGAGTKLEIKR

SEQ ID NO: 1979 - protein, 108 aa, Artificial Sequence
  Synthetic Polypeptide
DIVMTQSQKFMSTSVGDRVNVTCKASQNVGTNVVWYQQKTGQSPKALIHSASYRYSGVPDRFTGSGSGTDFTLTLSNVQSEDLAEYFCQHYNSFPYTFGGGTKLEIKR

SEQ ID NO: 1980 - protein, 107 aa, Artificial Sequence
  Synthetic Polypeptide
DIKMTQSPSSMYASLGERVTITCKASPDINSYLSWFQQKPGKSPKTLIYRANRLVDGVPSRFSGGGSGQDYSLTINSLEYEDMGIYYCLQYDEFPYTFGGGTKLEMK

SEQ ID NO: 1981 - protein, 108 aa, Artificial Sequence
  Synthetic Polypeptide
DVVVTPVSCFLSCISGAEGHHLIQGQQKCQYIWLLYALEPTETRTATQTPHLSCIQPRIWGPCQVQWQWVWDRLHPQHPSCGGGGCCNLLLSAHGAYTFGGGTRLELK

SEQ ID NO: 1982 - protein, 107 aa, Artificial Sequence
  Synthetic Polypeptide
QSVLTQPPSASAGGTPGQRVTISCSGSSSNIGSNFVYWYQQLPGTAPKLLIYRNNQRPSGVPDRFSGSRSGTSASLAGLRSEDEADYYCAADSLGGHYVFGTGTKVL

SEQ ID NO: 1983 - protein, 108 aa, Artificial Sequence
  Synthetic Polypeptide
EIVMTQSPATLSVSPGERATLSCRASQSVSSNLAWYQQKPGQAPRLLIYGASTRATGIPARFSGSGSGTDFTLTISSLQSVDSAVYYCQQYNNWPPYTFGQGTKLEIK

SEQ ID NO: 1984 - protein, 106 aa, Artificial Sequence
  Synthetic Polypeptide
ENVLTQSPAIMSASPGEKVTMTCSASSSVSYMHWYQQKSSTSPKLWIYDTSKLASGVPGRFSGSGSGNSYSLTISSMEAEDVATYYCFQGSGYPLTFGAGTKLELK

SEQ ID NO: 1985 - protein, 108 aa, Artificial Sequence
  Synthetic Polypeptide
DIQMTQSPSSLSASVGDRVTITCRASQSISSYLNWYQQKPGKAPKLLIYDASNLETGVPSRFSGSGSGTDFTFTISSLQPEDIATYYCQQYDNLPLTFGGGTKVDIKR

SEQ ID NO: 1986 - protein, 113 aa, Artificial Sequence
  Synthetic Polypeptide
DVVMTQSPLSLPVSLGDQASISCRSSQRLVHSNGNTYLHWYLQKPGQSPKLLIYRVSNRFPGVPDRFSGSGSGTDFTLKISRVEAEDLGIYFCSQSTHVPYTFGGGTKLEIKR

SEQ ID NO: 1987 - protein, 109 aa, Artificial Sequence
  Synthetic Polypeptide
SYELTQPPSVSVSPGQTATISCSGDQLGGKYGHWYQKKPGQSPVLVLYQDRKRPAGIPERFSGSSSGNTITLTISGTQAVDEADYYCQAWDTNLGGVFGGGTKVTVLGQ

SEQ ID NO: 1988 - protein, 113 aa, Artificial Sequence
  Synthetic Polypeptide
NFMLTQPHSVSESPGKTVTISCTRSSGSIASKYVQWYQQRPGSSPTTVIYEDNQRPSGVPDRFSGSIDTSSNSASLTISGLRTEDEADYYCHSYDSNNHSVFGGGTKVTVLGQ

SEQ ID NO: 1989 - protein, 108 aa, Artificial Sequence
  Synthetic Polypeptide
DIQMNQSPSSLSASLGDTITITCHASQNINVWLSWYQQKPGNIPKLLIYKASNLHTGVPSRFSGSGSGTGFTITISSLQPEDIATYYCQQGQSYPWTFGGGTKLEIKR

SEQ ID NO: 1990 - protein, 109 aa, Artificial Sequence
  Synthetic Polypeptide
ETTLTQSPGTLSLSPGERATLSCRASQSVSSSYLAWYQQKPGQAPRLLIYGASSRATGIPDRFSGSGSGTDFTLTISRLEPEDFAVYYCQQYGSSPYTFGQGTKLEIKR

SEQ ID NO: 1991 - protein, 108 aa, Artificial Sequence
  Synthetic Polypeptide
DIQMTQSPSILSASVGDRVTITCRASQRFGDYLAWYQQKPGQAPKLLIYGASTLQSGVPSRFSGSGSGTEFTLTISGLQPEDFATYYCQQANSFPITFGKGTRLDIRR

SEQ ID NO: 1992 - protein, 107 aa, Artificial Sequence; identical to SEQ ID NO: 1970
  Synthetic Polypeptide

SEQ ID NO: 1993 - protein, 107 aa, Artificial Sequence
  Synthetic Polypeptide
EIVLTQSPATLSLSPGERATLSCRASQSVRSYLAWYQQKPGQAPRLLIYDASNRATGIPARFSGSGSGTDFTLTISSLEPEDFAVYYCQQRSNWPPTFGQGTKVEIK

SEQ ID NO: 1994 - protein, 114 aa, Artificial Sequence
  Synthetic Polypeptide
DIVMTQTPLSLPVTPGEPASISCRSSRSLLDSDDGNTYLDWYLQKPGQSPQLLIYTLSYRASGVPDRFSGSGSGTDFTLKISRVEAEDVGVYYCMQRVEFPITFGQGTRLEIKR

SEQ ID NO: 1995 - protein, 107 aa, Artificial Sequence
  Synthetic Polypeptide
EIQMTQSPSSMSASLGDTITITCQATQDIFKNLNWYQQKPGKPPSLLIYYATELAEGVPSRFSGSGSGSDYSLTISNLESEDFAAYYCLQFFEFPFTFGSGTKLEMK

SEQ ID NO: 1996 - protein, 108 aa, Artificial Sequence
  Synthetic Polypeptide
DILLTQSPAILSVSPGERVSFSCRASQNIGTSIHWYQQRTNGSPRLLIKYASESVSGIPSRFSGSGSGTDFTLSINSVESEDIADYYCQHTNSWPTTFGGGTKLEIKR

SEQ ID NO: 1997 - protein, 113 aa, Artificial Sequence
  Synthetic Polypeptide
DIVMTQSPDSLAVSLGERATINCKSSQSLLNSGDQKNYLTWYQQKPGQPPKLLIYWASTRESGVPDRFSGSGSGTDFTLTISSLQAEDVAVYYCQNDYSYPLTFGQGTKVEIK

SEQ ID NO: 1998 - protein, 107 aa, Artificial Sequence
  Synthetic Polypeptide
DIQMTQSPSSLSASVGDRVTITCKASQDVSIAVAWYQQKPGKAPKVLIYSASYRYTGVPDRFSGSGSGTDFTFTISSLQPEDIAVYYCQQHYITPLTFGGGTKVEIK

SEQ ID NO: 1999 - protein, 111 aa, Artificial Sequence
  Synthetic Polypeptide
DIVMTQSPDSLAVSLGERATINCRASKSVSTSGYSYMHWYQQKPGQPPKLLIYLASNLESGVPDRFSGSGSGTDFTLTISSLQAEDVAVYYCQHSRELPYTFGQGTKLEIK

SEQ ID NO: 2000 - protein, 109 aa, Artificial Sequence
  Synthetic Polypeptide
AIQMTQSPSSLSASVGDRVTITCRASQSISNYLNWYQQKPGKAPKLLIYAASSLQSGVPSRFSGSGSGTDFTLTISSLQPEDFATYYCQQSYSSPSTTFGQGTKLEIKR

SEQ ID NO: 2001 - protein, 107 aa, Artificial Sequence
  Synthetic Polypeptide
QSVLTQPPSVSVSPGQTASITCSGDKLGDKYACWYQQKPGQSPVLVIYQDSKRPSGIPERFSGSNSGNTATLTISGTQAMDEADYYCQAWDSSTAVVFGGGTKLTVL

SEQ ID NO: 2002 - protein, 107 aa, Artificial Sequence
  Synthetic Polypeptide
DIVMTQSQKFMSTSVGDRVSIICKASQNVGTFVAWYQQKPGQSPKLLVYSASNRYTGVPDRFTGSGSGTDFTLTINNMQSEDLADYFCRQYSSYPYTFGGGTKLEIK

SEQ ID NO: 2003 - protein, 108 aa, Artificial Sequence
  Synthetic Polypeptide
DIQMTQSPSSLSASVGDRVTITCRASQSIGTSLHWYQQKPGKAPKLLIKFASRLQSGVPSRFSGSGSGTDFTLTISSLQPEDFATYYCQQSPGFPPTFGQGTKLEIKR

SEQ ID NO: 2004 - protein, 113 aa, Artificial Sequence
  Synthetic Polypeptide
EIVLTQSPLSLPVTPGEPASISCRSSQSLLHSIGYNYLDWYLQKPGQSPQLLIYLGSNRASGVPDRFSGSGSGTDFTLKISRVEAEDVGVYYCMQALQTPLTFGGGTKVEIKR

SEQ ID NO: 2005 - protein, 113 aa, Artificial Sequence
  Synthetic Polypeptide
DVVMTQSPLSLPVTPGEPASISCRSSQSLLHSIGYNYLHWFLQKPGQSPQLLIYLGSNRASGVPDRFSGSGSGTDFTLKISRVEAEDVGVYYCMQALQTPPTFGQGTRLEIKR

SEQ ID NO: 2006 - protein, 113 aa, Artificial Sequence
  Synthetic Polypeptide
DVVMTQSPLSLPVTPGEPASISCRSSQSLLHSNGHNYLDWYLQKPGQSPQLLIYLGSNRASGVPDRFSGSGSGTDFTLKISRVEAEDVGVYYCMQTLQTPLTFGPGTKVDIKR

SEQ ID NO: 2007 - protein, 107 aa, Artificial Sequence
  Synthetic Polypeptide
EIVLTQSPGTLSLSLGERATLSCRASQSISSSFLAWYQQKPGQAPKLLIYAASTRATGIPDRFSGSGSGTDFTLTISRLEPEDFAVYYCQQYGRSLSFGGGTKVEVK

SEQ ID NO: 2008 - protein, 110 aa, Artificial Sequence
  Synthetic Polypeptide
QAVVTQPPSASGTPGQRVTISCSGSSSNIGSNTVNWYQQVPGTAPKLLIYSNNQRPSGVPDRFSGSKSGTSASLAISGLQSEDEADYYCAAWDDSLNGWVFGGGTKLTVL

SEQ ID NO: 2009 - protein, 107 aa, Artificial Sequence
  Synthetic Polypeptide
DIQMTQSPSTLSASVGDRVTITCRASQNINKWLAWYQQRPGKAPQLLIYKASSLESGVPSRFSGSGSGTEYTLTISSLQPDDFATYYCQQYNSYATFGQGTKVEIKR

SEQ ID NO: 2010 - protein, 111 aa, Artificial Sequence
  Synthetic Polypeptide
QTVVTQPPSASGTPGQRVTISCSGSSSNIGSNYVYWYQQLPGTAPKLLIYRSNQRPSGVPDRFSGSKSGTSASLAISGPRSVDEADYYCAAWDDSLNGVVFGGGTKLTVLG

SEQ ID NO: 2011 - protein, 109 aa, Artificial Sequence
  Synthetic Polypeptide
QSVVTQPPSVSVAPGKTARITCGRNNIGSKSVHWYQQKPGQAPVLVVYDDSDRPSGIPERFSGSNSGNTATLTISRVEAGDEADYYCQVWDSSSDHVVFGGGTKLTVLG

SEQ ID NO: 2012 - protein, 109 aa, Artificial Sequence
  Synthetic Polypeptide
QAVLTQESALTTSPGETVTLTCRSSTGAVTTSNYANWVQEKPDHLFTGLIGGTNNRVPGVPARFSGSLIGDKAALTITGAQTEDEAIYFCVLWHSNHWVFGGGTKLTVL

SEQ ID NO: 2013 - protein, 108 aa, Artificial Sequence
  Synthetic Polypeptide
EIVLTQSPGTLSLSPGERATLSCRASQSVSNTYLAWYHQRPGQAPRLLIYGASSRATGIPDRFSGSGSGTDFALTISSLEPEDFAVYYCQQYSNSWTFGQGTKVEIKR

SEQ ID NO: 2014 - protein, 108 aa, Artificial Sequence
  Synthetic Polypeptide
ELTQDPAVSVALGQTVRITCQGDSLRSNYANWYQQKPGQAPVLVIYGQNNRPSGIPDRFSGSSSGNTASLTITGAQAADEADYYCDSRVSTGNHVVFGGGTKLTVLGQ

SEQ ID NO: 2015 - protein, 107 aa, Artificial Sequence
  Synthetic Polypeptide
DIVLTQTPATLSVTPGDSVSLSCRASQSISNNLHWYQQKSHESPRLLIKNASQSISGIPSKFSGSGSGTDFTLRINSVETEDFGMYFCQQSNSWPYTFGSGTKLEIK

SEQ ID NO: 2016 - protein, 106 aa, Artificial Sequence
  Synthetic Polypeptide
DIVMTQTPAIMSASPGQKVTITCSASSSVNYMHWYQQKLGSSPKLWIYDTSKLAPGVPARFSGSGSGTSYSLTISSMEAEDAASYFCHQWSSYPYTFGSGTKLEIK

SEQ ID NO: 2017 - protein, 106 aa, Artificial Sequence
  Synthetic Polypeptide
DIQMTQSPSSLSASVGDRVTITCSATSSISYMHWYQQKPGKAPKGWIYDTSKLAHGVPSRFSGSGSGTDFTLTISSLQPEDFATYYCHQRRSYPFTFGQGTKVEIK

SEQ ID NO: 2018 - protein, 108 aa, Artificial Sequence
  Synthetic Polypeptide
DIQMTQSPSSLSASVGDRVTITCKASQGFNKYVAWYQQKPGKAPKLLIYYTSTLQPGVPSRFSGSGSGRDYTLTISSLQPEDFATYYCLQYGNLLYAFGQGTKVEIKR

SEQ ID NO: 2019 - protein, 112 aa, Artificial Sequence
  Synthetic Polypeptide
DIQLTQSPSSLSASVGDRVTITCRASQSVDYDGDSYMNWYQQKPGKAPKLLIYAASYLESGVPSRFSGSGSGTDFTLTISSLQPEDFATYYCQQSHEDPYTFGQGTKVEIKR

SEQ ID NO: 2020 - protein, 107 aa, Artificial Sequence
  Synthetic Polypeptide
DIQMTQSPSSLSASVGDRVTITCRASQDIRYYLNWYQQKPGKAPKLLIYVASSLQSGVPSRFSGSGSGTEFTLTVSSLQPEDFATYYCLQVYSTPRTFGQGTKVEIK

SEQ ID NO: 2021 - protein, 107 aa, Artificial Sequence
  Synthetic Polypeptide
EIVMTQSPATLSVSPGERATLSCRASQSVSRNLAWYQQKPGQAPRLLIYGASTRATGIPARFSGSGSGTEFTLTIGSLQSEDFAVYYCQQYKTWPRTFGQGTNVEIK

SEQ ID NO: 2022 - protein, 107 aa, Artificial Sequence
  Synthetic Polypeptide
EIVMTPSSATLSVSPGERATLSCRASQSVSRNLAWYQQKPGQAPRLLIYGASTRATGIPARFSGSGSGTEFTLTISSLQSEDFAVYYCHQYSNWMCSFGQGTKLEIK

SEQ ID NO: 2023 - protein, 108 aa, Artificial Sequence
  Synthetic Polypeptide
DIQMTQSPSSLSASVGDRVTITCKASKNIRSYLAWYQQKPGKAPKLLIYSGSTLHSGVPSRFSGSGSGTDFTLTISSLQPEDFATYYCQQHHEYPLTFGQGTKVEIKR

SEQ ID NO: 2024 - protein, 15 aa, Artificial Sequence
  Synthetic Polypeptide
GGGGSGGGGSGGGGS

SEQ ID NO: 2025 - protein, 35 aa, Artificial Sequence
  Synthetic Polypeptide
GGSGSGGGGSGGGGSGSGGSGSGGSGSGGSGSGGS

SEQ ID NO: 2026 - protein, 35 aa, Artificial Sequence
  Synthetic Polypeptide
GGGGSGGGGSGGGGSGSGGSGSGGSGSGGSGSGGS

SEQ ID NO: 2027 - protein, 25 aa, Artificial Sequence
  Synthetic Polypeptide
SSADDAKKDAAKKDDAKKDDAKKDG

SEQ ID NO: 2028 - protein, 117 aa, Artificial Sequence
  Synthetic Polypeptide
EVQLVQSGAEVKKPGESLTISCKASGYSFPNYWITWVRQMSGGGLEWMGRIDPGDSYTTYNPSFQGHVTISIDKSTNTAYLHWNSLKASDTAMYYCARYYVSLVDIWGQGTLVTVSS

SEQ ID NO: 2029 - protein, 124 aa, Artificial Sequence
  Synthetic Polypeptide
EVQLVESGGGLVKPGGSLRLSCAASGFTFSNAWMSWVRQAPGKGLEWVGFIRSKAYGGTTEYAASVKGRFTISRDDSKSIAYLQMNNLKTEDTAVYYCARDGLYSSSWYDSDYWGQGTLVTVSS

SEQ ID NO: 2030 - protein, 126 aa, Artificial Sequence
  Synthetic Polypeptide
QMQLVQSGGGLVQPGRSLRLSCAASGFTFDDYAMHWVRQAPGKGLEWVSGISWNSGSIGYADSVKGRFTISRDNAKNSLYLQMNSLRAEDTALYYCAKDIHSGSYYGLLYYAMDVWGQGTTVTVSS

SEQ ID NO: 2031 - protein, 125 aa, Artificial Sequence
  Synthetic Polypeptide
GGGGSQVQLQQSGAELVKPGASVKISCKASGYAFSSYWMNWVKQRPGKGLEWIGQIYPGDGDTTYNGKFKGKATLTADKSSSTVYMQLNSLTSEDSAVYFCVRYYYGSSGYFDYWGQGTTLTVSS

SEQ ID NO: 2032 - protein, 120 aa, Artificial Sequence
  Synthetic Polypeptide
ALQLQQSGAELVRPGASVTLSCKASGYTFTDYEMHWVKQTPVHGLEWIGAIDPETGGTAYNQKFEGKAILTADKSSSTAYMELRSLTSEDSPVYYCARRRYYGSSSFDYWGQGTTLTVSS

SEQ ID NO: 2033 - protein, 123 aa, Artificial Sequence
  Synthetic Polypeptide
EVQLVESGGGLVQPGGSLRLSCSASGFTFSSFGMHWVRQAPGKGLEWVAYISSGSSTIYYGDTVKGRFTISRDNAKNSLFLQMSSLRAEDTAVYYCAREGGYYYGRSYYTMDYWGQGTTVTVS

SEQ ID NO: 2034 - protein, 118 aa, Artificial Sequence
  Synthetic Polypeptide
QVQLVQSGAEVKKPGASVKVSCKASGYTFTDYYMHWVRQAPGQRLEWMGWINPNSGGTNYAQKFQDRITVTRDTSSNTGYMELTRLRSDDTAVYYCARSPYSGVLDKWGQGTLVTVSS

SEQ ID NO: 2035 - protein, 117 aa, Artificial Sequence
  Synthetic Polypeptide
EVQLVQSGAEVKKPGESLKISCKGSGYDFTTYWIGWVRQMPGKGLEWMGIIYPGDSDTRYSPSVRGRVTISADKSINTAYLQWSSLEASDTAMYYCARMWTFSQDGWGQGTLVTVSS

SEQ ID NO: 2036 - protein, 117 aa, Artificial Sequence
  Synthetic Polypeptide
QVQLVQSGPEVKKPGESVKISCKASGYTFRHYSMNWVKQAPGQGLKWMGRINTESGVPIYADDFKGRFSFTVDTSASTAYLEISSLTSEDTAVYFCSNDYLYSLDFWGQGTTLTVSS

SEQ ID NO: 2037 - protein, 121 aa, Artificial Sequence
  Synthetic Polypeptide
QVQLVQSGAEVKKPGSSVKVSCKASGGTFSNYWMHWVRQAPGQGLEWMGATYRGHSDTYYNQKFKGRVTITADKSTSTAYMELSSLRSEDTAVYYCARGAIYDGYDVLDNWGQGTLVTVSS

SEQ ID NO: 2038 - protein, 125 aa, Artificial Sequence
  Synthetic Polypeptide
LEMAQVQLVQSGAEVKKPGSSVKVSCKASGGTFSSYAISWVRQAPGQGLEWMGRIIPILGIANYAQKFQGRVTITADKSTSTAYMELSSLRSEDTAVYYCARGGYYSHDMWSEDWGQGTLVTVSS

SEQ ID NO: 2039 - protein, 117 aa, Artificial Sequence
  Synthetic Polypeptide
QVQLVQSGSELKKPGESVKISCKASGYTFTDYSINWVKQAPGQGLKWMGWINTETREPAYAYDFRGRFVFSLDTSASTAYLQISSLKAEDTAVYFCALDYSYAMDYWGQGTLVTVSS

SEQ ID NO: 2040 - protein, 117 aa, Artificial Sequence
  Synthetic Polypeptide
QVQLVQSGSELKKPGESVKISCKASGYTFTHYSMNWVRQAPGQGLEWMGRINTETGEPLYADDFKGRFVFSLDTSASTAYLQISSLKAEDTAVYYCSNDYLYSLDYWGQGTLVTVSS

SEQ ID NO: 2041 - protein, 118 aa, Artificial Sequence
  Synthetic Polypeptide
QVQLVQSGAEVKKPGASVKVSCKASGYTFASQWMHWMRQAPGQGLEWIGWINPGNVNTKYNEKFKGRATLTVDTSTNTAYMELSSLRSEDTAVYYCARSTWYRPLDYWGQGTLVTVSS

SEQ ID NO: 2042 - protein, 120 aa, Artificial Sequence [sequence omitted]

SEQ ID NO: 2043 - protein, 118 aa, Artificial Sequence
  Synthetic Polypeptide
QIQLVQSGPELKKPGETVKISCKASGYIFTNYGMNWVKQAPGKSFKWMGWINTYTGESTYSADFKGRFAFSLETSASTAYLHINDLKNEDTATYFCARSGGYDPMDYWGQGTSVTVSS

SEQ ID NO: 2044 - protein, 120 aa, Artificial Sequence
  Synthetic Polypeptide
EVQLVQSGAELKKPGASVKVSCKASGYTFTDYYMKWVRQAPGQGLEWIGDIIPSNGATFYNQKFKGRVTITVDKSTSTAYMELSSLRSEDTAVYYCARSHLLRASWFAYWGQGTLVTVSS

SEQ ID NO: 2045 - protein, 120 aa, Artificial Sequence
  Synthetic Polypeptide
QVQLVQSGAELKKPGASVKVSCKASGYTFTDYYMKWVRQAPGQGLEWIGDIIPSNGATFYNQKFKGRVTITVDKSTSTAYMELSSLRSEDTAVYYCARSHLLRASWFAYWGQGTLVTVSS

SEQ ID NO: 2046 - protein, 118 aa, Artificial Sequence
  Synthetic Polypeptide
EVQLVQSGAEVKKPGESLKISCKGSGYSFTSYWISWVRQMPGKGLEWMGIIDPSDSDTRYSPSFQGQVTISADKSISTAYLQWSSLKASDTAMYYCARGDGSTDLDYWGQGTLVTVSS

SEQ ID NO: 2047 - protein, 118 aa, Artificial Sequence
  Synthetic Polypeptide
QVQLQESGPGLVKPSETLSLTCTVSGFSLTTYDVHWVRQPPGKGLEWMGRIQNAGITDYNSALKSRLIISRDTSKSQVFLKMNSVTTADTAMYFCAKTGSYFYAFDHWGQGTLVTVSS

SEQ ID NO: 2048 - protein, 119 aa, Artificial Sequence
  Synthetic Polypeptide
QVQLQESGPTLVKPGDSVKMSCKASGYTFTDYIIHWVKQSHGKSLEWIGYINPYSDGTNYNEKFKSKATLTVDKSTSTAYMEFSRLTSEDSAIYFCALNYGSYYAMDAWGQGTSVTVSS

SEQ ID NO: 2049 - protein, 119 aa, Artificial Sequence
  Synthetic Polypeptide
EVQLLESGGGLVQPGGSLRLSCAASGFTFSGYWMHWVRQAPGKGLEWVSAIRSDGSSKYYADSVKGRFTISRDNSKNTLYLQMNSLRAEDTAVYYCAKDGVIEDTFDYWGQGTLVTVSS

SEQ ID NO: 2050 - protein, 115 aa, Artificial Sequence
  Synthetic Polypeptide
QVQLQQPGAELVRPGASVKLSCKASGYTFTSYWMNWVKQRPDQGLEWIGRIDPYDSETHYNQKFKDKAILTVDKSSSTAYMQLSSLTSEDSAVYYCARGNWDDYWGQGTTLTVSS

SEQ ID NO: 2051 - protein, 119 aa, Artificial Sequence
  Synthetic Polypeptide
QVQLQESGPTLVNPGDSVKMSCKASGYTFTDHIIHWVKQSHGKSLEWIGYINPYSGGANYNGKFKSKATLTIDKSSSTAYMEFSRLTSGDSAIYYCALNYGSYYAMDAWGQGTSVTVSS

SEQ ID NO: 2052 - protein, 119 aa, Artificial Sequence
  Synthetic Polypeptide
EVQLVESGGGLVQPGRSLKLSCAASGFTFSDYNMAWVRQAPKKGLEWVATILYDGGRTYYRGSVKGRFTISRDNAKSTLYLRMDSLRSEDTATYYCATHSRGTDYFDYWGQGVMVTVSS

SEQ ID NO: 2053 - protein, 121 aa, Artificial Sequence
  Synthetic Polypeptide
EVKLQESGPSLVQSSQTLSLTCTVSGFSLTSYHIHWVRQTPGKGLEWMGVMWSDGDTSYNSALKSRLSISRDTSQSQVFLKMNSLQTEDTATYYCARGYYSSYLYLWFAYWGQGTLVTVSS

SEQ ID NO: 2054 - protein, 125 aa, Artificial Sequence
  Synthetic Polypeptide
QVQLQQSGPELRRPGSSVRLSCKASGYRIKDFLIHWIKNRPEHGLEWIGWIDPEDGETKYAQKFQTKATLTADTSSNTAYMQLSSLTSEDTATYFCARWGDVYYGLMRGHVMDAWGQGTSVTVSS

SEQ ID NO: 2055 - protein, 122 aa, Artificial Sequence
  Synthetic Polypeptide
QVQLQQSGSELMMPGASVKISCKATGYTFSNYWIEWVKQRPGHGLEWIGEILPGTGRTIYNEKFKGKATFTADISSNTVQMQLSSLTSEDSAVYYCARRDYYGNFYYAMDYWGQGTSVTVSS

SEQ ID NO: 2056 - protein, 118 aa, Artificial Sequence
  Synthetic Polypeptide
EVQLQQSGPELVKPGASVKMSCKASGYTFTDYYMKWMKQSHGKSLEWIGDINPNNGGTTYNQKFKGKATLTVDKSSSTAYMQLNSLTSEDSAVYYCARDYGYGYFDYWGQGTTLTVSS

SEQ ID NO: 2057 - protein, 121 aa, Artificial Sequence
  Synthetic Polypeptide
EVQLQQSGPELIKPGASVKMSCKASGYTFTSYVMHWVKQKPGQGLEWIGYINPYNDGTKYNEKFKGKATLTSDKSSSTAYMELSSLTSEDSAVYYCARGTYYYGSRVFDYWGQGTTLTVSS

SEQ ID NO: 2058 - protein, 120 aa, Artificial Sequence
  Synthetic Polypeptide
QVQLQESGPGLVKPSQTLSLTCTVSGGSISTSGMGVGWIRQHPGKGLEWIGHIWWDDDKRYNPALKSRVTISVDTSKNQFSLKLSSVTAADTAVYYCARMELWSYYFDYWGQGTLVTVSS

SEQ ID NO: 2059 - protein, 120 aa, Artificial Sequence; identical to SEQ ID NO: 2058
  Synthetic Polypeptide

SEQ ID NO: 2060 - protein, 124 aa, Artificial Sequence
  Synthetic Polypeptide
QVQLQQSGAELVRPGSSVKISCKASGYAFSSYWMNWVKQRPGQGLEWIGQIWPGDGDTNYNGKFKGKATLTADESSSTAYMQLSSLASEDSAVYFCARRETTTVGRYYYAMDYWGQGTTVTVSS

SEQ ID NO: 2061 - protein, 120 aa, Artificial Sequence
  Synthetic Polypeptide
EVKLQESGPGLVAPSQSLSVTCTVSGVSLPDYGVSWIRQPPRKGLEWLGVIWGSETTYYNSALKSRLTIIKDNSKSQVFLKMNSLQTDDTAIYYCAKHYYYGGSYAMDYWGQGTSVTVSS

SEQ ID NO: 2062 - protein, 119 aa, Artificial Sequence
  Synthetic Polypeptide
VKLQESGPGLVAPSQSLSVTCTVSGVSLPDYGVSWIRQPPRKGLEWLGVIWGSETTYYNSALKSRLTIIKDNSKSQVFLKMNSLQTDDTAIYYCAKHYYYGGSYAMDYWGQGTSVTVSS

SEQ ID NO: 2063 - protein, 120 aa, Artificial Sequence
  Synthetic Polypeptide
QVQLQESGPGLVKPSETLSLTCTVSGVSLPDYGVSWIRQPPGKGLEWIGVIWGSETTYYNSSLKSRVTISKDNSKNQVSLKLSSVTAADTAVYYCAKHYYYGGSYAMDYWGQGTLVTVSS

SEQ ID NO: 2064 - protein, 121 aa, Artificial Sequence
  Synthetic Polypeptide
EVQLVESGGGLVQPGGSLRLSCAASGFTFSSSWMNWVRQAPGKGLEWVGRIYPGDGDTNYNGKFKGRFTISRDDSKNSLYLQMNSLKTEDTAVYYCARSGFITTVLDFDYWGQGTLVTVSS

SEQ ID NO: 2065 - protein, 121 aa, Artificial Sequence
  Synthetic Polypeptide
EVQLVQSGAEVKKPGESLKISCKGSGYSFSSSWIGWVRQMPGKGLEWMGIIYPDDSDTRYSPSFQGQVTISADKSIRTAYLQWSSLKASDTAMYYCARHVTMIWGVIIDFWGQGTLVTVSS

SEQ ID NO: 2066 - protein, 121 aa, Artificial Sequence
  Synthetic Polypeptide
EVQLVESGGGLVKPGGSLKLSCAASGYTFTSYVMHWVRQAPGKGLEWIGYINPYNDGTKYNEKFQGRVTISSDKSISTAYMELSSLRSEDTAMYYCARGTYYYGTRVFDYWGQGTLVTVSS

SEQ ID NO: 2067 - protein, 123 aa, Artificial Sequence
  Synthetic Polypeptide
QVQLVESGGGLVEPGGSLRLSCMSGYAFSSYWMNWVRQMPGKGLEWMGQIWPGDGDTNYNPSLKSRVTITADESTSTAYMELSSLKAEDTAVYFCARRETTTVGRYYYAMDYWGQGTLVTVSS

SEQ ID NO: 2068 - protein, 120 aa, Artificial Sequence
  Synthetic Polypeptide
QVQLVESGGGLVEPGGSLRLSCMSGYAFSSSWMNWVRQMPGKGLEWMGRIYPGDGDTNYNGKFKERVTITADESTSTAYMELSSLKAEDTAVYFCARSEYWGNYWAMDYWGQGTLVTVSS

SEQ ID NO: 2069 - protein, 121 aa, Artificial Sequence
  Synthetic Polypeptide
QVQLVESGGGLVEPGGSLRLSCMSGYAFSSYWMNWVRQMPGKGLEWMGQIYPGDGDTNYNGKFKGRVTITADESTSTAYMELSSLKAEDTAVYFCARKTISSVVDFYFDNWGQGTLVTVSS

SEQ ID NO: 2070 - protein, 120 aa, Artificial Sequence
  Synthetic Polypeptide
QVQLEQPGAEVVKPGASVKVSCKTSGYTFTSNWMHWVKQTPGKGLEWIGEIDPSDSYTNYNQKFDGKAKLTVDKSSSTAYMEVSDLTAEDSATYYCARGSNPYYYAMDYWGQGTSVTVSS

SEQ ID NO: 2071 - protein, 121 aa, Artificial Sequence
  Synthetic Polypeptide
QVQLQQPGAELVKPGASVKMSCKASGYAFSSYWINWMKQKPGQGLEWIGQIYPGDGDTNYNGKFKGRATLTADTSSSTAYMQLSSLTSEDSAVYFCARSITTVVGCAMDYWGQGTSVTVSS

SEQ ID NO: 2072 - protein, 124 aa, Artificial Sequence
  Synthetic Polypeptide
QVQLQQSGAEVKKPGSSVKVSCKASGYAFSSYWMNWVRQRPGQGLEWIGQIWPGDGDTNYNGKFKGRATITADESTNTAYMELSSLRSEDTAFYSCARRETTTVGRYYYAMDYWGQGTTVTVSS

SEQ ID NO: 2073 - protein, 122 aa, Artificial Sequence
  Synthetic Polypeptide
EVQLVESGGGLVQPGRSLRLSCAASGFTFNDYAMHWVRQAPGKGLEWVSTISWNSGSIGYADSVKGRFTISRDNAKKSLYLQMNSLRAEDTALYYCAKDIQYGNYYYGMDVWGQGTTVTVSS

SEQ ID NO: 2074 - protein, 119 aa, Artificial Sequence
  Synthetic Polypeptide
QVQLVQSGAEVKKPGSSVKVSCKASGYAFSYSWINWVRQAPGQGLEWMGRIFPGDGDTDYNGKFKGRVTITADKSTSTAYMELSSLRSEDTAVYYCARNVFDGYWLVYWGQGTLVTVSS

SEQ ID NO: 2075 - protein, 122 aa, Artificial Sequence
  Synthetic Polypeptide
EVQLQQSGAELKKPGASVKVSCKASGYTFTSYNMHWVKQTPGQGLEWIGAIYPGNGDTSYNQKFKGKTTLTADKSSSTAYMELSSLRSEDTAVYYCARSNYYGSSYWFFDVWGTGTTVTVSS

SEQ ID NO: 2076 - protein, 125 aa, Artificial Sequence
  Synthetic Polypeptide
EVQLVQSGGGLVHPGGSLRLSCTGSGFTFSYHAMHWVRQAPGKGLEWVSIIGTGGVTYYADSVKGRFTISRDNVKNSLYLQMNSLRAEDMAVYYCARDYYGAGSFYDGLYGMDVWGQGTTVTVSS

SEQ ID NO: 2077 - protein, 123 aa, Artificial Sequence
  Synthetic Polypeptide
AVQLVESGGGLVQPGRSLRLSCAASGFTFGDYTMHWVRQAPGKGLEWVSGISWNSGSIGYADSVKGRFTISRDNAKNSLYLQMNSLRAEDTALYYCTKDNQYGSGSTYGLGVWGQGTLVTVSS

SEQ ID NO: 2078 - protein, 122 aa, Artificial Sequence [sequence omitted]

SEQ ID NO: 2079 - protein, 121 aa, Artificial Sequence
  Synthetic Polypeptide
QVQLQQSGAEVKKPGSSVKVSCKASGYTFTSYNMHWVKQAPGQGLEWIGAIYPGNGDTSYNQKFKGKATLTADESTNTAYMELSSLRSEDTAFYYCARSTYYGGDWYFDVWGQGTTVTVSS

SEQ ID NO: 2080 - protein, 128 aa, Artificial Sequence
  Synthetic Polypeptide
QIQLVQSGSELKKPGASVKVSCKASGYTFTNFGVNWVRQAPGKGLEWMGWINTYTGEPSYAQGFTGRFVFSLDASVSTAYLQISSLKAEDTATYFCTRRTNYYGTSYYYAMDYWGQGTTVTVSSAKTT

SEQ ID NO: 2081 - protein, 120 aa, Artificial Sequence
  Synthetic Polypeptide
QAYLQQSGAELVRPGASVKMSCKASGYTFTSYNMHWVKQTPRQGLEWIGGIYPGNGDTSYNQKFKGKATLTVGKSSSTAYMQLSSLTSEDSAVYFCARYDYNYAMDYWGQGTSVTVSSAS

SEQ ID NO: 2082 - protein, 122 aa, Artificial Sequence [sequence omitted]

SEQ ID NO: 2083 - protein, 122 aa, Artificial Sequence
  Synthetic Polypeptide
QVQLVQSGAEVKKPGASVKVSCKASGYTFTSYNMHWVRQAPGQRLEWIGAIYPGNGDTSYNQKFKGRVTVTRDTSANTAYMELSSLKSEDTAVYYCARSHYGSNYVDYFDYWGQGTLVTVSS

SEQ ID NO: 2084 - protein, 122 aa, Artificial Sequence
  Synthetic Polypeptide
EVQLVESGGGLVQPDRSLRLSCAASGFTFHDYAMHWVRQAPGKGLEWVSTISWNSGTIGYADSVKGRFTISRDNAKNSLYLQMNSLRAEDTALYYCAKDIQYGNYYYGMDVWGQGTTVTVSS

SEQ ID NO: 2085 - protein, 121 aa, Artificial Sequence
  Synthetic Polypeptide
EVQLVQSGAEVKKPGESLKLSCKGSGRTFTSYNMHWVRQMPGKGLEWMGAIYPLTGDTSYNQKSKLQVTISADKSISTAYLQWSSLKASDTAMYYCARSTYVGGDWQFDVWGKGTTVTVSS

SEQ ID NO: 2086 - protein, 120 aa, Artificial Sequence
  Synthetic Polypeptide
EVQLVESGGGLVQPGGSLRLSCAASGYEFSRSWMNWVRQAPGKGLEWVGRIYPGDGDTNYSGKFKGRFTISADTSKNTAYLQMNSLRAEDTAVYYCARDGSSWDWYFDVWGQGTLVTVSS

SEQ ID NO: 2087 - protein, 117 aa, Artificial Sequence
  Synthetic Polypeptide
QVQLEESGGGVVRPGRSLRLSCAASGFTFSDYGVNWIRQAPGKGLEWVTIIWGDGRTDYNSALKSRFTVSRNNSNNTLSLQMNSLTTEDTAVYYCVRAPGNRAMEYWGQGVLVTVSS

SEQ ID NO: 2088 - protein, 124 aa, Artificial Sequence
  Synthetic Polypeptide
QVQLQQSGPGLVKPSQTLSLTCAISGDSVSSNSAAWNWIRQSPSRGLEWLGRTYYRSKWYNDYAVSVKSRITINPDTSKNQFSLQLNSVTPEDTAVYYCAREVTGDLEDAFDIWGQGTMVTVSS

SEQ ID NO: 2089 - protein, 117 aa, Artificial Sequence
  Synthetic Polypeptide
QVQLVQSGAEVKKPGSSVKVSCKASGGTFSSYAISWVRQAPGQGLEWMGGIIPILGTANYAQKFQGRVTITADESTSTAYMELSSLRSEDTAVYYCARWGGGAFDIWGQGTMVTVSS

SEQ ID NO: 2090 - protein, 112 aa, Artificial Sequence
  Synthetic Polypeptide
QVQLQQWGAGLLKPSETLSLTCAVYGGSFSAYYWSWIRQPPGKGLEWIGDINHGGGTNYNPSLKSRVTISVDTSKNQFSLKLNSVTAADTAVYYCASLTAYWGQGSLVTVSS

SEQ ID NO: 2091 - protein, 117 aa, Artificial Sequence
  Synthetic Polypeptide
QVQLVQSGAEVKKPGASVKVSCKVSGYTFTDYYITWVRQAPGQALEWMGWIYPGSGNTKYSQKFQGRFVFSVDTSASTAYLQLSSLKAEDTAVYYCANYGNYWFAYWGQGTLVTVSS

SEQ ID NO: 2092 - protein, 119 aa, Artificial Sequence
  Synthetic Polypeptide
EVQLVQSGGGLVHPGGSLRLSCAGSGFAFSSSTMHWIRQAPGKGLEWISLIGSGGGIYYGDSVKGRFTISRDNAKNSLYLQMNSLRAEDMAVYYCVRGYFDWVDYFDYWGQGTLVTVSS

SEQ ID NO: 2093 - protein, 120 aa, Artificial Sequence
  Synthetic Polypeptide
EVQLVESGGGLVQPGGSLRLSCAASGFTFSSYGMHWVRQAPGKGLEWVAYITTRSSTIYYADSVKGRFTISRDNAKNSLYLQMNSLRAEDTAVYYCTREPLTGYYAMDYWGQGTSVTVSS

SEQ ID NO: 2094 - protein, 116 aa, Artificial Sequence
  Synthetic Polypeptide
DVQLQESGPGLVKPSQSLSLTCTVTGFSITSDYSWNWIRQFPGNKLEWMGYISYSGHTSYNPSLESRISITRDTSKNQFFLQLNSVTTEDTATYYCTRGNWDVVYWGQGTLVTVSA

SEQ ID NO: 2095 - protein, 118 aa, Artificial Sequence
  Synthetic Polypeptide
QVQLQQPGAEVVKPGASVKMSCKASGYTFTSYYIHWIKQTPGQGLEWVGVIYPGNDDISYNQKFQGKATLTADKSSTTAYMQLSSLTSEDSAVYYCAREVRLRYFDVWGQGTTVTVSS

SEQ ID NO: 2096 - protein, 122 aa, Artificial Sequence
  Synthetic Polypeptide
QVQLVQSGAEVKKPGASVKVSCKASGYTFTNYGMNWVKQAPGQGLKWMGWINTYTGEPTYADDFKGRVTMTSDTSTSTAYLELHNLRSDDTAVYYCARWSWSDGYYVYFDYWGQGTTVTVSS

SEQ ID NO: 2097 - protein, 119 aa, Artificial Sequence
  Synthetic Polypeptide
QVQLVQSGAEVKKPGSSVKVSCKASGGTFSDYAISWVRQAPGQGLEWMGRIIPILGVANYAQKFQGRVTITADKSTRTAYMELSSLRSEDTAVYYCARNWADAFDIWGQGTMVTVSSAS

SEQ ID NO: 2098 - protein, 122 aa, Artificial Sequence
  Synthetic Polypeptide
EVKLQQSGPELVKPGTSVKVSCKASGYSFTDYNMYWVKQSHGKSLEWIGYIDPYKGGTIYNQKFKGKATLTVDKSSSTAFMHLNSLTSEDSAVYYCAREMITAYYFDYWGQGSSVTVSSLER

SEQ ID NO: 2099 - protein, 117 aa, Artificial Sequence
  Synthetic Polypeptide
QVQLVQSGAEVKKPGASVKVSCKASGYTFTNYDINWVRQAPGQGLEWIGWIYPGDGSTKYNEKFKAKATLTADTSTSTAYMELRSLRSDDTAVYYCASGYEDAMDYWGQGTTVTVSS

SEQ ID NO: 2100 - protein, 117 aa, Artificial Sequence
  Synthetic Polypeptide
QVQLVQSGAEVKKPGSSVKVSCKASGGIFSNHAISWVRQAPGQGLEWMGGIIPIFGTANYAQKFQGRVTITADESTSTAFMELSSLRSEDTAVYYCAREWADVFDIWGQGTMVTVSS

SEQ ID NO: 2101 - protein, 117 aa, Artificial Sequence
  Synthetic Polypeptide
EVQLQQSGAELVKPGASVKMSCKAFGYTFTTFPIEWMKQSHGKSLEWIGNFHPYNDQTKYNEEFKGRAKLTIDRSSSTVYLELGRLTSDDSAVYYCARGYYYAFDFWGQGTTLTVSS

SEQ ID NO: 2102 - protein, 117 aa, Artificial Sequence; identical to SEQ ID NO: 2101
  Synthetic Polypeptide

SEQ ID NO: 2103 - protein, 118 aa, Artificial Sequence
  Synthetic Polypeptide
EVQLVESGGALIQPGGSLRLSCVASGFTISGNYMSWVRQAPGKGLEWVSLIYSGDSTYYADSVKGRFTISRDISKNTVYLQMNSLRVEDTAVYYCVRDGYYVSDMVVWGKGTTVTVSS

SEQ ID NO: 2104 - protein, 122 aa, Artificial Sequence
  Synthetic Polypeptide
QIQLVQSGSELKKPGASVKVSCKASGYTFTNYGMNWVRQAPGQGLKWMGWINTNTGEPKYAEEFKGRFALSLDTSVSTAYLQINSLKAEDTAVYFCARGYGNYARGAWLAYWGQGTLVTVSS

SEQ ID NO: 2105 - protein, 114 aa, Artificial Sequence
  Synthetic Polypeptide
EVQLVESGGGLVKPGGSLRLSCAASGFTFSSYDMSWVRQAPGKGLEWVSTISSGGSYTYYLDSIKGRFTISRDNAKNSLYLQMNSLRAEDTAVYYCARQGLDYWGRGTLVTVSS

SEQ ID NO: 2106 - protein, 121 aa, Artificial Sequence
  Synthetic Polypeptide
QVQLKESGPELEKPGASVKISCKASGYSFTAYSMNWVKQNNGMSLEWIGSIDPYYGDTKYAQKFKGKATLTVDKASSTAYLQLKSLTSEDSAVYYCARRMITTGDWYFDVWGAGTTVTVSS

SEQ ID NO: 2107 - protein, 121 aa, Artificial Sequence; identical to SEQ ID NO: 2106
  Synthetic Polypeptide

SEQ ID NO: 2108 - protein, 118 aa, Artificial Sequence
  Synthetic Polypeptide
QVQLVQSGAEVKKPGASVKVSCKASGYTFTNYGMNWVRQAPGQGLEWMGWINTYTGEPTYADAFKGRFAFSLDTSTSTAYLQINSLRSDDTAVYYCARDYGDYGMDYWGQGTTVTVSS

SEQ ID NO: 2109 - protein, 113 aa, Artificial Sequence
  Synthetic Polypeptide
QVQLQQPGAELVRPGASVKLSCKASGYTFTSYWMNWVKQRPGQGLEWIGMIDPSDSETHYNHIFKDKATLTVDKSSSTAYLQLSSLTSEDSAVYYCARNLYLWGQGTSVTVSS

SEQ ID NO: 2110 - protein, 117 aa, Artificial Sequence [sequence omitted]

SEQ ID NO: 2111 - protein, 114 aa, Artificial Sequence
  Synthetic Polypeptide
QVQLVQSGAEVKKPGASVKVSCKASGYTFKDTYIHWVRQAPGQGLEWMGRIDPANGNTKYDPKFQGRVTMTRDTSISTAYMELSRLRSDDTAVYYCARRGGVDWGQGTLVTVSS

SEQ ID NO: 2112 - protein, 123 aa, Artificial Sequence
  Synthetic Polypeptide
EVQLQQSVAELVKPGASVKMSCKVSGYTLTDHTIHWMKQRPEQGLEWIGYIYPRDGITGYNEKFKGKATLTADTSSSTAYMQLNSLTSEDSAVYFCARWGYSYRNYAYYYDYWGQGTTLTVSS

SEQ ID NO: 2113 - protein, 125 aa, Artificial Sequence
  Synthetic Polypeptide
QVQLQESGPGLAKPSETLSLTCTVSGDSITSYYWSWIRQPPGKGLEWIGYIYYSGSTNYNPSLKSRVTISVDTSKNQFSLKLSSVTAADTAVYYCARDQRRIAAAGTHFYGMDVWGQGTTVTVSS

SEQ ID NO: 2114 - protein, 116 aa, Artificial Sequence
  Synthetic Polypeptide
QVQLLESGGGLVQPGGSLRLSCAASGFTFSSYAMSWVRQAPGKGLEWVSVIRSSGSSTYYADSVKGRFTISRDNSKNTLYLQMNSLRAEDTAVYYCARGGGYFDYWGQGTLVTVSS

SEQ ID NO: 2115 - protein, 118 aa, Artificial Sequence
  Synthetic Polypeptide
QVQLLESGGGLVQPGGSLRLSCAASGFTFSSHGMHWVRQAPGKGLEWVSVISGSGSNTGYADSVKGRFTISRDNSKNTLYLQMNSLRAEDTAVYYCARQWGSYAFDSWGQGTLVTVSS

SEQ ID NO: 2116 - protein, 118 aa, Artificial Sequence
  Synthetic Polypeptide
QVQLEESGPELVKPGASVKLSCKASGYTFTEYIIHWVKQRSGQGLEWIGWFYPGSGSIKYNEKFKDKATLTADKSSSTVYMELSGLTSEDSAVYFCARHDGYSYFDYWGQGTTLTVSS

SEQ ID NO: 2117 - protein, 115 aa, Artificial Sequence
  Synthetic Polypeptide
ESGRGLVQPGGSRKLSCAASGFTFSTSGMHWVRQAPEKGLEWVAYISSGSTTIYHADTVKGRFTISRDNPKNTLFLQMTSLRSEDTAMYYCCARSGQFGNYFDYWGQGTTLTVSS

SEQ ID NO: 2118 - protein, 120 aa, Artificial Sequence
  Synthetic Polypeptide
EVQLQQSGPELVKPGASVKMSCKASGYTFTSYFIHWVKQKPGQGLEWIGFINPYNDGSKYNEKFKGKATLTSDKSSSTAYMELSSLTSEDSAVYYCTRDDGYYGYAMDYWGQGTSVTVSS

SEQ ID NO: 2119 - protein, 120 aa, Artificial Sequence
  Synthetic Polypeptide
EVQLQQSGPELVKPGASVKMSCKASGYTFTSYVMHWVKQKPGQGLEWIGYINPYNDGTKYNEKFKGKATLTSDTSSSTAYMELNSLTSEDSAVYFCARPIYFDNDYFDYWGQGTTLKVSS

SEQ ID NO: 2120 - protein, 121 aa, Artificial Sequence
  Synthetic Polypeptide
EVQLVQSGAEVKKPGASVKVSCKASGYTFTDYYLDVVVRQAPGQGLEWIGRVNPYNGGTIYNQKFKGRVTLTRDTSTSTAYLELSSLRSEDTAVYYCARDHYRYDPLLDYWGQGTLVTVSS

SEQ ID NO: 2121 - protein, 122 aa, Artificial Sequence
  Synthetic Polypeptide
EVQLVQSGAEVKKPGASVKVSCKASGYSFTDYYMHWVRQAPGQGLEWIGRINPYNGAAFYSQNFKDRVTLTVDTSTSTAYLELSSLRSEDTAVYYCAIERGADLEGYAMDYWGQGTLVTVSS

SEQ ID NO: 2122 - protein, 123 aa, Artificial Sequence
  Synthetic Polypeptide
QVQLQESGPGLVKPSETLSLTCAVSGYSITSAYYWNWIRQPPGKGLEWIGYISYDGRNNYNPSLKNRITINPDTSKNQFSLQLNSVTPEDTAVYYCAREGDYDVGNYYAMDYWGQGTLVTVSS

SEQ ID NO: 2123 - protein, 123 aa, Artificial Sequence
  Synthetic Polypeptide
EVQLVESGGGLVQPGRSLRLSCAASGYSITSAYYWNWVRQAPGKGLEWVSYISYDGRNNYNPSLKNRFTISRDNAKKSLYLQMNSLRAEDTALYYCAKEGDYDVGNYYAMDYWGQGTTVTVSS

SEQ ID NO: 2124 - protein, 122 aa, Artificial Sequence
  Synthetic Polypeptide
QVQLQESGPGLVKPSETLSLTCTVSGGSISSSNYYWGWIRQPPGKGLEWIGAIYYSGSTYYNPSLKSRVAISVDTSKNQFSLKLSSVTAADTAVYYCARRIGVAGQWYFDLWGRGTLVTVSS

SEQ ID NO: 2125 - protein, 122 aa, Artificial Sequence
  Synthetic Polypeptide
QIQLVQSGPDLKKPGETVKISCKASGYTFTNTGMNWVKQAPGKGLKWMGWINTYTGEPTYADDFKGRFTFSLETSASTAYLQINNLKNEDTATYFCTRWGYGSSLYYAMDYWGQGTSVTVSS

SEQ ID NO: 2126 - protein, 119 aa, Artificial Sequence
  Synthetic Polypeptide
EVQLVESGGGLVQPGGSLRLSCAASGFDFSRYWMSWVRQAPGKGLEWIGEINPDSSTINYAPSLKDKFIISRDNAKNSLYLQMNSLRAEDTAVYYCARPDGNYWYFDVWGQGTLVTVSS

SEQ ID NO: 2127 - protein, 120 aa, Artificial Sequence
  Synthetic Polypeptide
QVQLQQPGAELVRPGASVKLSCKASGYSFTTYWMNWVKQRPGQGLEWIGMIHPSDSETRLNQKFKDKATLTVDKSSSTAYMQLSSPTSEDSAVYYCARSTMIATRAMDYWGQGTSVTVSS

SEQ ID NO: 2128 - protein, 120 aa, Artificial Sequence
  Synthetic Polypeptide
QVQLVQSGAEVKKPGASVKVSCKASGYAFSSSWMNWVRQAPGQGLEWIGRIYPGDGDTKYNGKFKGKATLTADKSTSTAYMELSSLRSEDTAVYYCARSTMIATGAMDYWGQGTLVTVSS

SEQ ID NO: 2129 - protein, 117 aa, Artificial Sequence
  Synthetic Polypeptide
EVQLVESGGGLVQPGGSLRLSCAASGFTFSDYYMAWVRQAPGKGLEWVAEINYDGSSTYYVDSVKGRFTISRDNAKNSLYLQMNSLRAEDTAVYYCARDRGFYFDYWGQGTTVTVSS

SEQ ID NO: 2130 - protein, 117 aa, Artificial Sequence
  Synthetic Polypeptide
EVQLVESGGGLVQPGGSLRLSCAASGFTFSDYYMAWVRQAPGKGLEWVASINYDGESTYYVDSVKGRFTISRDNAKNSLYLQMNSLRAEDTAVYYCARDRGYYFDYWGQGTTVTVSS

SEQ ID NO: 2131 - protein, 117 aa, Artificial Sequence
  Synthetic Polypeptide
EVQLVESGGGLVQPGGSLRLSCAASGFTFSDYYMAWVRQAPGKGLEWVADINYDGGSTYYLDSLKSRFTISRDNAKNSLYLQMNSLRAEDTAVYYCARDRGYYFDYWGQGTLVTVSS

SEQ ID NO: 2132 - protein, 121 aa, Artificial Sequence
  Synthetic Polypeptide
QVQLQQSGAELARPGASVKLSCKASGYTFTSYWMQWVKQRPGQGLEWIGAIYPGDGDTRYTQKFKGKATLTADKSSSTAYMQLSSLASEDSAVYYCARGKVYYGSNPFAYWGQGTLVTVSA

SEQ ID NO: 2133 - protein, 120 aa, Artificial Sequence
  Synthetic Polypeptide
QVQLQQSGPELVKPGASVKISCKASGYAFSSSWMNWVKQRPGQGLEWIGRIYPGDGDTKYNGKFKGKATLTADKSSSTAYMQLSSLTSVDSAVYFCARSTMIATGAMDYWGQGTSVTVSS

SEQ ID NO: 2134 - protein, 120 aa, Artificial Sequence
  Synthetic Polypeptide
QVQLVQSGAEVKKPGASVKVSCKVSGYTLTELSIHWVRQAPGKGLEWMGGFDPEENEIVYAQRFQGRVTMTEDTSTDTAYMELSSLRSEDTAVYYCAIVGSFSGIAYRPWGQGTMVTVSS

SEQ ID NO: 2135 - protein, 120 aa, Artificial Sequence
  Synthetic Polypeptide
QVQLVQSGAEVKKPGASVKVSCKVSGYTLTELSIHWVRQAPGKGLEWMGGFDPEENEIVYAQRFQGRVTMTEDTSTDTAYMELSSLRSEDTAVYYCAIVGSFSPLTLGLWGQGTMVTVSS

SEQ ID NO: 2136 - protein, 124 aa, Artificial Sequence
  Synthetic Polypeptide
QITLKESGPTLVKPTQTLTLTCTFSGFSLSTSGMGVGWIRQPPGKALEWLAHIWWDDVKRYSPSLKSRLTITKDTSKNQVVLTMTNMDPVDTATYYCARIVSFDNDVVSAMDYWGQGTLVTVSS

SEQ ID NO: 2137 - protein, 118 aa, Artificial Sequence
  Synthetic Polypeptide
QVQLVQSGAEVKKPGASVKVSCKASGYTFTNYGMNWVRQAPGQGLEWMGWINTYTGEPTYADDFKGRVTMTTDTSTSTAYMELRSLRSDDTAVYYCARIGDSSPSDYWGQGTLVTVSS

SEQ ID NO: 2138 - protein, 115 aa, Artificial Sequence
  Synthetic Polypeptide
EVQLLESGGGLVQPGGSLRLSCAASGFTFSGYAMSWVRQAPGKGLEWVSEIAPPGLNTRYADSVKGRFTISRDNSKNTLYLQMNSLRAEDTAVYYCAKSDTAFDYWGQGTLVTVS

SEQ ID NO: 2139 - protein, 119 aa, Artificial Sequence
  Synthetic Polypeptide
QVQLKQSGPGLVQPSQSLSITCTVSGFSLTNYGVHWVRQSPGKGLEWLGVIWSGGNTDYNTPFTSRLSINKDNSKSQVFFKMNSLQSNDTAIYYCARALTYYDYEFAYWGQGTLVTVSA

SEQ ID NO: 2140 - protein, 123 aa, Artificial Sequence [sequence omitted]

SEQ ID NO: 2141 - protein, 116 aa, Artificial Sequence
  Synthetic Polypeptide
EVQVLESGGGLVQPGGSLRLSCAASGFTFSSYAMSWVRQAPGKGLEWVSAISGSGGSTNYADSVKGRFTISRDNSKNTLYLQMNSLRAEDTAVYYCAGSSGWSEYWGQGTLVTVSS

SEQ ID NO: 2142 - protein, 114 aa, Artificial Sequence
  Synthetic Polypeptide
EIQLVQSGAEVKKPGESLRISCKGSGFNIEDYYIHWVRQMPGKGLEWMGRIDPENDETKYGPIFQGHVTISADTSINTVYLQWSSLKASDTAMYYCAFRGGVYWGQGTTVTVSS

SEQ ID NO: 2143 - protein, 127 aa, Artificial Sequence
  Synthetic Polypeptide
EVQLLESGGGVVQPGRSLRLSCAASGFTFSSYGMHWVRQAPGKGLEWVAVISYDGSNKYYADSVKGRFTISRDNSKNTLYLQMNSLRAEDTAVYYCAKDMGWGSGWRPYYYYGMDVWGQGTTVTVSS

SEQ ID NO: 2144 - protein, 120 aa, Artificial Sequence
  Synthetic Polypeptide
EVQLLEQSGAELVRPGTSVKISCKASGYAFTNYWLGWVKQRPGHGLEWIGDIFPGSGNIHYNEKFKGKATLTADKSSSTAYMQLSSLTFEDSAVYFCARLRNWDEPMDYWGQGTTVTVSS

SEQ ID NO: 2145 - protein, 117 aa, Artificial Sequence
  Synthetic Polypeptide
EVKLDETGGGLVQPGRPMKLSCVASGFTFSDYWMNWVRQSPEKGLEWVAQIRNKPYNYETYYSDSVKGRFTISRDDSKSSVYLQMNNLRVEDMGIYYCTGSYYGMDYWGQGTSVTVS

SEQ ID NO: 2146 - protein, 118 aa, Artificial Sequence
  Synthetic Polypeptide
GVKLDETGGGLVQPGGAMKLSCVTSGFTFGHYWMNWVRQSPEKGLEWVAQFRNKPYNYETYYSDSVKGRFTISRDDSKSSVYLQMNNLRVEDTGIYYCTGASYGMEYLGQGTSVTVST

SEQ ID NO: 2147 - protein, 126 aa, Artificial Sequence [sequence omitted]

SEQ ID NO: 2148 - protein, 124 aa, Artificial Sequence
  Synthetic Polypeptide
VHEVQLVQSGAEVKKPGSSVKVSCKASGGTFSSYAISWVRQAPGQGLEWMGGIIPIFGTANYAQKFQGRVTITADKSTSTAYMELSSLRSEDTAVYYCATFALFGFREQAFDIWGQGTTVTVSS

SEQ ID NO: 2149 - protein, 122 aa, Artificial Sequence [sequence omitted]

SEQ ID NO: 2150 - protein, 118 aa, Artificial Sequence
  Synthetic Polypeptide
QVQLVQSGAEVVKPGASVKISCKASGYTFTGYFMNWVKQSPGQSLEWIGRIHPYDGDTFYNQKFQGKATLTVDKSSNTAHMELLSLTSEDFAVYYCTRYDGSRAMDYWGQGTTVTVSS

SEQ ID NO: 2151 - protein, 124 aa, Artificial Sequence
  Synthetic Polypeptide
QVQLVQSGAEVKKPGASVKVSCKASGYTFTTYGISWVRQAPGQGLEWMGWISAYNGHTNYAQMLQGRVTMTTDTSTSTAYMELRGLRSDDTAVYYCAREAYASYGSGSYWTDYWGQGTLVTVSS

SEQ ID NO: 2152 - protein, 113 aa, Artificial Sequence
  Synthetic Polypeptide
EVQLVQSGAEVEKPGASVKISCKASGSSFTGYNMNWVRQNIGKSLEWIGAIDPYYGGTSYNQKFKGRATLTVDKSTSTAYMHLKSLRSEDTAVYYCVSGMEYWGQGTSVTVSS

SEQ ID NO: 2153 - protein, 121 aa, Artificial Sequence
  Synthetic Polypeptide
QVQLVESGPGVVQPGRSLRISCAVSGFSVTNYGVHWVRQPPGKGLEWLGVIWAGGITNYNSAFMSRLTISKDNSKNTVYLQMNSLRAEDTAMYYCASRGGHYGYALDYWGQGTLVTVSSTR

SEQ ID NO: 2154 - protein, 119 aa, Artificial Sequence
  Synthetic Polypeptide
EVTLVESGGDFVKPGGSLKVSCAASGFAFSHYAMSWVRQTPAKRLEWVAYISSGGSGTYYSDSVKGRFTISRDNAKNTLYLQMRSLRSEDSAMYFCTRVKLGTYYFDSWGQGTTLTVSS

SEQ ID NO: 2155 - protein, 123 aa, Artificial Sequence
  Synthetic Polypeptide
QSVKESEGGLFKPTDTLTLTCTVSGFSLSRHALTWVRQAPGNGLEWIGAIDNAGTTYYASWAKSRSTITRNTDLHTVTLKMTSLTASDTATYFCARVFYDINSGYYLDGMDLWGPGTLVTVSS

SEQ ID NO: 2156 - protein, 118 aa, Artificial Sequence
  Synthetic Polypeptide
EQLKESGGGLFKPTDTLTLTCTVSGFSLSYYGVNWVRQAPGNGLEWIGTIGGSGDTYYASWAKSRSTIIRNTNENTVTLKMTSLTAADTATYFCVRYANIGYEYFNVWGPGTLVTVSS

SEQ ID NO: 2157 - protein, 121 aa, Artificial Sequence
  Synthetic Polypeptide
EVQLVESGGGLVQPGESLRLSCVASGFTFSRYKMNWVRQAPGKGLEWVSYISRSGRDIYYADSVKGRFTISRDNAKNSLYLQMNSLRDEDTAVYYCAGTVTTYYYFGMDVWGHGTTVTVSS

SEQ ID NO: 2158 - protein, 122 aa, Artificial Sequence
  Synthetic Polypeptide
EVQLVESGGGSVQPGESLRLSCVASGFTFSRYKMNWVRQAPGKGLEWVSYISRSGRDIYYADSVKGRFTISRDNAKNSLYLQMNSLRDEDTAVYYCAGTVTTYYYDFGMDVWGQGTTVTVSS

SEQ ID NO: 2159 - protein, 124 aa, Artificial Sequence
  Synthetic Polypeptide
EVQLVQSGGGSLTLSCAASGVVQPGRFTFSSYGMHWVRQAPGKGLEWVSVISYDGSNKYYADSVKGRFTISRDNSKNTLYLQMNSLRTEDTAVYYCAKTLSAGEWIGGGAFDIWGHGTMVTVSS

SEQ ID NO: 2160 - protein, 119 aa, Artificial Sequence
  Synthetic Polypeptide
QVKLQESGGGLVKPGGSLKLSCAASGFTFSSYGMSWVRQTPDKRLEWVATISSGGSYTYYPDSVKGRFTISRDNAKNTLYLQMSSLKSEDTAMYYCARGNWEGWYFDVWGQGTTVTVSS

SEQ ID NO: 2161 - protein, 115 aa, Artificial Sequence
  Synthetic Polypeptide
QVQLQQSGAELVRPGASVKLSCKASGYTFNDYEMHWVKQTPVHGLKWIGALEPKTGDTAYSQKFKGKATLTADKSSSTAYMELRSLTSEDSAVYYCTSCYYYTYSGQGTLVTVSA

SEQ ID NO: 2162 - protein, 119 aa, Artificial Sequence [sequence omitted]

SEQ ID NO: 2163 - protein, 116 aa, Artificial Sequence
  Synthetic Polypeptide
EVQLVESGGGLIQPGGSLRLSCAASGFTFSNYAMNWVRQAPGKGLEWVSTINGRGSSTIYADSVKGRFTISRDNSKNTLYLQMNSLRAEDTATYYCARYISRGLGDSWGQGTLVTV

SEQ ID NO: 2164 - protein, 117 aa, Artificial Sequence
  Synthetic Polypeptide
EVQLVESGGGLVKPGGSLRLSCAASGFTFSDYYMSWIRQAPGKGLEWVSYISSSGSTIYYADSVKGRFTISRDNAKNSLYLQMNSLRAEDTAVYYCARGYGKAYDQWGQGTLVTVSS

SEQ ID NO: 2165 - protein, 114 aa, Artificial Sequence
  Synthetic Polypeptide
EVQLVETGGNLVQPGASLRLSCAASGFSFSGTAMHWVRQAPGKGLEWVSTISSTGRSTYYRDSVKGRFTISRDNSKNTLYLQMNSLRGEDTAVYYCARVSFDYWGQGTLVTVSS

SEQ ID NO: 2166 - protein, 118 aa, Artificial Sequence
  Synthetic Polypeptide
EVQLVESGGAFVQPGGSLRLSCAASGFTFSSYAMTWVRQAPGKGLEWVSTISGRGRSTFYADSVKGRFTISRDNSKNTLYLQMNSLRAEDTAVYYCARYYHAGAFDLWGQGTLVTVSS

SEQ ID NO: 2167 - protein, 120 aa, Artificial Sequence
  Synthetic Polypeptide
EVQLVESGGGLVQPGGSLRLSCAASGFNIKDTYIHWVRQAPGKGLEWVARIYPTNGYTRYADSVKGRFTISADTSKNTAYLQMNSLRAEDTAVYYCSRWGGDGFYAMDVWGQGTLVTVSS

SEQ ID NO: 2168 - protein, 129 aa, Artificial Sequence
  Synthetic Polypeptide
QVQLLQSGAAVTKPGASVRVSCEASGYNIRDYFIHWWRQAPGQGLQWVGWINPKTGQPNNPRQFQGRVSLTRHASWDFDTFSFYMDLKALRSDDTAVYFCARQRSDYWDFDVWGSGTQVTVSSASTKGP

SEQ ID NO: 2169 - protein, 118 aa, Artificial Sequence
  Synthetic Polypeptide
EVQLVETGGGLVQPGESLRLSCAASGFTFSDYEMNWVRQAPGKGLEWVSYISSSGSTIYYADSVKGRFTIYRDNAKNSLYLQMNSLRAEDTALYYCARAWGVGPPDYWGQGTLVTVSS

SEQ ID NO: 2170 - protein, 135 aa, Artificial Sequence
  Synthetic Polypeptide
QPQLQESGPTLVEASETLSLTCAVSGDSTAACNSFWGWVRQPPGKGLEWVGSLSHCASYWNRGWTYHNPSLKSRLTLALDTPKNLVFLKLNSVTAADTATYYCARFGGEVLRYTDWPKPAWVDLWGRGTLVTVSS

SEQ ID NO: 2171 - protein, 121 aa, Artificial Sequence
  Synthetic Polypeptide
QVQLVQSGGQMKKPGESMRISCRASGYEFIDCTLNWIRLAPGKRPEWMGWLKPRGGAVNYARPLQGRVTMTRDVYSDTAFLELRSLTVDDTAVYFCTRGKNCDYNWDFEHWGRGTPVIVSS

SEQ ID NO: 2172 - protein, 128 aa, Artificial Sequence
  Synthetic Polypeptide
LEQSGAEVKKPGSSVQVSCKASGGTFSMYGFNWVRQAPGHGLEWMGGIIPIFGTSNYAQKFRGRVTFTADQATSTAYMELTNLRSDDTAVYYCARDFGPDWEDGDSYDGSGRGFFDFWGQGTLVTVSS

SEQ ID NO: 2173 - protein, 123 aa, Artificial Sequence
  Synthetic Polypeptide
QVQLVQSGGGVVQPGGSLRVSCAASGVTLSDYGMHWVRQAPGKGLEWVAFIRNDGSDKYYADSVKGRFTISRDNSEKTVSLQMSSLRAEDTAVYYCAKNGESGPLDYWYLDLWGRGTLVTVSS

SEQ ID NO: 2174 - protein, 122 aa, Artificial Sequence
  Synthetic Polypeptide
EVQVEVSGGGLVQPGGSMRLSCAVSGFTFSNYWMNWVRQSPEKGLEWIAEIRLKSNNFARYYAESVKGRFTISRDNSKNSLYLQMISLRAEDTAIYYCTSYGNYVGHYFDHWGQGTLLTVSS

SEQ ID NO: 2175 - protein, 122 aa, Artificial Sequence
  Synthetic Polypeptide
LEMAQVQLQQWGAGLLKPSETLSLTCAVYGGSFSGYYWSWIRQPPGKGLEWIGEINHSGSTNYNPSLKSRVTISVDTSKNQFSLKLSSVTAADTAVYYCARAPQSWYVGDVWGQGTLVTVSS

SEQ ID NO: 2176 - protein, 122 aa, Artificial Sequence
  Synthetic Polypeptide
QVQLVQSGAEVKKPGSSVKVSCKASGGTFSSYAISWVRQAPGQGLEWMGGIIPIFGTANYAQKFQGRVTITADESTSTAYMELSSLRSEDTAVYYCARGVYGYSGSAPYDEWGQGTLVTVSS

SEQ ID NO: 2177 - protein, 122 aa, Artificial Sequence
  Synthetic Polypeptide
EVQLVQSGAEVSVKVSCKASGGKKPGSTFSSYTISWVRQAPGQGLEWMGGIIPIFGTANYAQKFQGRVTITADKSTSTAYMELSSLRSEDTAVYYCAGDTDSSGYYGAVDYWGQGTLVTVSS

SEQ ID NO: 2178 - protein, 124 aa, Artificial Sequence
  Synthetic Polypeptide
QVQLVQSGGGVVQPGRSLRLSCAASGFTFSSYGMHWVRQAPGKGLEWVAVISYDGSNKYYADSVKGRFTISRDNSKNTLYLQMNSLRAEDTAVYYCARDFDYGDSYYYYGMDVWGQGTTVTVSS

SEQ ID NO: 2179 - protein, 118 aa, Artificial Sequence
  Synthetic Polypeptide
EVQLLESGGGLVQPGGSLRLSCAASGFTFSWYSMTWVRQAPGKGLEWVSSIVPWGDFTQYADSVKGRFTISRDNSKNTLYLQMNSLRAEDTAVYYCAKGPGWGSFDLWGRGTLVTVSS

SEQ ID NO: 2180 - protein, 116 aa, Artificial Sequence
  Synthetic Polypeptide
EVQLVESGGGLVQPGGSLRLSCAASGFSLTKYGVHWVRQAPGKGLEWVGVKWAGGSTDYNSALMSRFTISKDNAKNSLYLQMNSLRAEDTAVYYCARDHRDAMDYWGQGTLVTVSS

SEQ ID NO: 2181 - protein, 122 aa, Artificial Sequence
  Synthetic Polypeptide
EVQLVESGGGLVQPGGSLRLSCAASGFTFSRNGMSWVRQAPGKGLEWVATVSSGGSYIYYADSVKGRFTISRDNAKNSLYLQMNSLRAEDTAVYYCARQGTTALATRFFDVWGQGTLVTVSS

SEQ ID NO: 2182 - protein, 107 aa, Artificial Sequence
  Synthetic Polypeptide
DIQMTQSPSSLSASVGDSVTITCQASQDISSYLNWYQQKPGKAPELLIYYGSELESGVPSRFSGSGSGTDFTFTISSLEAEDAATYYCGQGNRLPYTFGQGTKVEIE

SEQ ID NO: 2183 - protein, 128 aa, Artificial Sequence
  Synthetic Polypeptide
QVQLQQSGPGLVKPSQTLSLTCAISGDSVSSYNAVWNWIRQSPSRGLEWLGRTYYRSGWYNDYAESVKSRITINPDTSKNQFSLQLNSVTPEDTAVYYCARSGHITVFGVNVDAFDMWGQGTMVTVSS

SEQ ID NO: 2184 - protein, 121 aa, Artificial Sequence
  Synthetic Polypeptide
EVQLQQSGTVLARPGTSVKMSCRASGYSFTTFWMHWVKQRPGQGPEWIGAIYPENSDTRYNPTFKDKAELTAVTSANTVYMELSSLTDEDSAVYYCTRPSLYAMDYWGQGTSVTVSSAKTT

SEQ ID NO: 2185 - protein, 122 aa, Artificial Sequence; identical to SEQ ID NO: 2125
  Synthetic Polypeptide

SEQ ID NO: 2186 - protein, 117 aa, Artificial Sequence
  Synthetic Polypeptide
EVQLVQSGGGLVQSGGSLRLSCRASGYTFTRYWMLWVRQRPGKGLEWVAEINPRNDRTNYNEKFKTRFTISVDRSKNTLYLQMDSLRAEDTAVYFCALGGGYAMDYWGQGTLVTVSS

SEQ ID NO: 2187 - protein, 118 aa, Artificial Sequence
  Synthetic Polypeptide
QVQLVQSGAELVKPGASVKMSCKASGYIFTNYNIHWVKKSPGQGLEWIGAIYPGNGDAPYSQKFQDRATLTADTSSSTTYMELSSLTSEDSAVYYCVRANWDVAFAYWGQGTLVSVSS

SEQ ID NO: 2188 - protein, 119 aa, Artificial Sequence
  Synthetic Polypeptide
QVQLQQSGASVKVSCKASELVRPGTGYAFTNYLIEWVKQRPGQGLEWIGVINPGSGGTNYNEKFKGKATLTADKSSSTAYMQLSSLTSDDSAVYFCARYRSYDWYFDVWGAGTTVTVSS

SEQ ID NO: 2189 - protein, 118 aa, Artificial Sequence
  Synthetic Polypeptide
EVQLVESGGGVVQPGRSLRLSCSSSGPTFSDYYMYWVRQAPGKGLEWVAYMSNVGAITDYPDTVKGRPTISRDNSKNTLFLMDSLRPEDTGVYFCARGTRDGSWFAYWGQGTPVTVSS

SEQ ID NO: 2190 - protein, 119 aa, Artificial Sequence
  Synthetic Polypeptide
QVQLKESGPGLVAPSQSLSITCTISGFSLTSYGVHWVRQPPGKGLEWLVVIWSDGSTTYNSALKSRLSISKDNSKSQVFLKMNSLQTDDTAIYYCASHYGSTLAFASWGHGTLVTVSAA

SEQ ID NO: 2191 - protein, 127 aa, Artificial Sequence
  Synthetic Polypeptide
EVQLEESGGGLVQPGGSMKLSCVASGFTFSNYWMNWVRQSPEKGLEWVAEIRFKSHNYATHFAESVKGRFTISRDDSKSSVYLQMNNLRAEDTGIYYCTRRIGNSDYDWWYFDVWGAGTSVTVSSAS

SEQ ID NO: 2192 - protein, 120 aa, Artificial Sequence
  Synthetic Polypeptide
EVQLQQSGAEVKKPGSSVKVSCKASGGTFSSYAISWVRQAPGQGLEWMGRIIPILGIANYAQKFQGRVTITADKSTSTAYMELSSLRSEDTAVYYCARDVGSGSYSLDYWGQGTLVTVSS

SEQ ID NO: 2193 - protein, 118 aa, Artificial Sequence
  Synthetic Polypeptide
QLQLQESGPGLVKPSETLSLTCTVSGGSISSSSYYWGWIRQPPGKGLEWIGSIYYSGSTYYNPSLKSRVTISVDTSKNQFSLKLSSVTAADTAVYYCARHVGHELDYWGQGTLVTVSS

SEQ ID NO: 2194 - protein, 119 aa, Artificial Sequence
  Synthetic Polypeptide
QVQLQESGPGLVKPSETLSLTCTVSGGSVSSGSYYWSWIRQPPGKGLEWIGYIYYSGSTNYNPSLKSRVTISVDTSKNQFSLKLSSVTAADTAVYYCAREGKNGAFDIWGQGTMVTVSS

SEQ ID NO: 2195 - protein, 119 aa, Artificial Sequence; identical to SEQ ID NO: 2194
  Synthetic Polypeptide

SEQ ID NO: 2196 - protein, 118 aa, Artificial Sequence
  Synthetic Polypeptide
DVQLQESGPGLVKPSQSLSLTCTVTGYSITIDYTWNWIRQFPGNKLEWMGYITYSGSTDYNPSLKSRSSITRDTSMNQFFLQLNSVTTEDTATYYCARLGRRYALDYWGQGTSVTVSS

SEQ ID NO: 2197 - protein, 118 aa, Artificial Sequence
  Synthetic Polypeptide
DVQLQESGPGLVKPSQSLSLTCTVTGYSITSDYTWNWIRQFPGNKLEWMGYITYSGSTSYNPSLKSRNSITRDTSKNQFFLQLNSVTTEDTATYYCARLGRRYTMDYWGQGTSVTVSS

SEQ ID NO: 2198 - protein, 118 aa, Artificial Sequence; identical to SEQ ID NO: 2197
  Synthetic Polypeptide

SEQ ID NO: 2199 - protein, 120 aa, Artificial Sequence
  Synthetic Polypeptide
EVQLVESGGGLVQPKGSLKLSCAASGFSFNTYAMNWVRQAPGKGLEWIAHIRSKSNNFATYYADSVKDRFSISRDASENILFLQMNNLKTEDTAMYYCVRQGGDFPMDYWGQGTSVTVSS

SEQ ID NO: 2200 - protein, 115 aa, Artificial Sequence
  Synthetic Polypeptide
QVQLQQSGPELVKPGASVKMSCKASGYAFSSSWLNWVRQRPGKGLEWIGRIYPGDGENHYNGKFKGKATLTADKSSSTGYMQLSSLTSEDSAVYFCASYYEGGYWGQGTLITVSA

SEQ ID NO: 2201 - protein, 118 aa, Artificial Sequence
  Synthetic Polypeptide
QVQLVQSGPEVKKPGASVKVSCKASGYTFTNSWMNWVRQRPGKGLEWIGRIYPGDGETIYNGKFRVRVTITADESTSTAYMELSSLRSEDTAVYYCARGYDDYSFAYWGQGTTVTVSS

SEQ ID NO: 2202 - protein, 113 aa, Artificial Sequence
  Synthetic Polypeptide
QVQLQQSGPGLVKPSETLSLTCTVSGDSISSYYWSWIRQPPGKGLEWIGYIYYSGSTNYNPSLKSRVTISVDTSKSQFSLKLSSVTAADTAVYYCARGRYFDVWGRGTMVTSS

SEQ ID NO: 2203 - protein, 115 aa, Artificial Sequence
  Synthetic Polypeptide
EVKLVESGGGLVKPGGSRKLSCAASGFTFSSYTMSWVRQTPAKRLEWVATISSGSSTIYYADTVKGRFTISRDNAKNTLFLQMTSLRSEDTAMYYCARRWFLDCWGQGTTLTVSS

SEQ ID NO: 2204 - protein, 123 aa, Artificial Sequence
  Synthetic Polypeptide
EVQLVQSGAEVKKPGSSVKVSCKASGGTFSSYAISWVRQAPGQGLEWMGGIIPIFGTANYAQKFQGRVTITADESTSTAYMELSSLRSEDTAVYYCARGPEYCINGVCSLDVWGQGTTVTVSS

SEQ ID NO: 2205 - protein, 121 aa, Artificial Sequence
  Synthetic Polypeptide
EVQLVQSGAEVKKPGSSVKVSCKASGGTFSSYAISWVRQAPGQGLEWMGGIIPIFGTANYAQKFQGRVTITADESTSTAYMELSSLRSEDTAVYYCAVHYGDYVFSSMDVWGQGTTVTVSS

SEQ ID NO: 2206 - protein, 122 aa, Artificial Sequence
  Synthetic Polypeptide
VKLQESGGGFVKPGGSLKVSCAASGFTFSSYAMSWVRLSPEMRLEWVATISSAGGYIFYSDSVQGRFTISRDNAKNTLHLQMGSLRSGDTAMYYCARQGFGNYGDYYAMDYWGQGTTVTVSS

SEQ ID NO: 2207 - protein, 115 aa, Artificial Sequence
  Synthetic Polypeptide
QVHLQESGPGLVKPSETLSLTCTVSDDSISSYYWSWIRQPPGKGLEWIGHISYSGSANYNPSLKSRVTISVDTSKNQFSLKLSSVTAADTAVYYCANWDDAFNIWGQGTMVTVSS

SEQ ID NO: 2208 - protein, 114 aa, Artificial Sequence
  Synthetic Polypeptide
VQLQESGPDLVKPSQSLSLTCTVTGYSITSGYSWHWIRQFPGNKLEWMGYIHYSGDTDYNPSLKSRFSITRDTSKNQFFLQLNSVTTEDTATYYCATPGGFVYWGQGTLVTVSS

SEQ ID NO: 2209 - protein, 118 aa, Artificial Sequence
  Synthetic Polypeptide
VQLLESGGGLVQPGGSLRLSCAASGFTFSTYQMSWVRQAPGKGLEWVSGIVSSGGSTAYADSVKGRFTISRDNSKNTLYLQMNSLRAEDTAVYYCAGELLPYYGMDVWGQGTTVTVSS

SEQ ID NO: 2210 - protein, 119 aa, Artificial Sequence
  Synthetic Polypeptide
EVQLLESGGGLVQPGGSLRLSCAASGFTFSTYEMHWVRQAPGKGLEWVSVILSSGGETNYADSVKGRFTISRDNSKNTLYLQMNSLRAEDTAVYYCAGMLLPYYGMDVWGQGTTVTVSS

SEQ ID NO: 2211 - protein, 113 aa, Artificial Sequence
  Synthetic Polypeptide
QVYLVESGGGVVQPGRSLRLSCAASGFTFSNYGMHWVRQAPGKGLEWVALIWYDGSNKYYADSVKGRFTISRDNSKNTLYLQMTSLRVEDTAVYYCASNVDHWGQGTLVTVSS

SEQ ID NO: 2212 - protein, 110 aa, Artificial Sequence
  Synthetic Polypeptide
QVQLVESGGGWQPGRSLRLDCKASGITFSNSGMHWVRQAPGKGLEWVAVIYDGSKRYYADSVKGRFISRDNSKNTLFLQMNSLRAEDTAVYYCATNDDYWGQGTLVTVSS

SEQ ID NO: 2213 - protein, 118 aa, Artificial Sequence [sequence omitted]

SEQ ID NO: 2214 - protein, 115 aa, Artificial Sequence
  Synthetic Polypeptide
QSLEESGGRLVKPDETLTITCTVSGIDLSSNGLTWVRQAPGEGLEWIGTINKDASAYYASWAKGRLTISKPSSTKVDLKITSPTTEDTATYFCGRIAFKTGTSIWGPGTLVTVSS

SEQ ID NO: 2215 - protein, 107 aa, Artificial Sequence
  Synthetic Polypeptide
EVKLEESGGDLVKPGGSLKLSCAASGFTFSGYGMSWVRQTPDKRLEWVATISSGGSYTYYPDSVKGRFTISRDNAKNTLYLQMSSLKSEDTAMYYCARHEGGYYGSS

SEQ ID NO: 2216 - protein, 134 aa, Artificial Sequence
  Synthetic Polypeptide
VAAPRWVLSQVQLQESGPGLVKPSQTLSLTCTVSGGSISSGGYYWIWIRQHPGKGLEWIGYIYYNGNTYYNPSLKSRVTMSVDTSKNQFSLKLSSVTAADTAVYYCARDGITMIRGYYYGMDVWGQGTTVTVSS

SEQ ID NO: 2217 - protein, 130 aa, Artificial Sequence
  Synthetic Polypeptide
GLQCVAAPRWVLSQVQLQQWGAGLLKPSETLSLTCAVYGGSFSGNYWSWIRQPPGKGLEWIGEINHSGSTNYNPSLKSRVTISVDTSKNQFSLKLSSVTAADTAVYYCARGGSYNYFDYWGQGTLVTVSS

SEQ ID NO: 2218 - protein, 123 aa, Artificial Sequence
  Synthetic Polypeptide
QVQLVESGGGVVQPGRSLRLSCAASGFAFSRYGMHWVRQAPGKGLEWVAVIWYDGSNKYYADSVKGRFTISRDNSKNTQYLQMNSLRAEDTAVYYCARGGDFLYYYYYGMDVWGQGTTVTVSS

SEQ ID NO: 2219 - protein, 115 aa, Artificial Sequence
  Synthetic Polypeptide
EVQLVQSGPEVKKPGATVKISCKTSGYTFTEYTIHWVKQAPGKGLEWIGNINPNNGGTTYNQKFEDKATLTVDKSTDTAYMELSSLRSEDTAVYYCAAGWNFDYWGQGTLLTVSS

SEQ ID NO: 2220 - protein, 120 aa, Artificial Sequence
  Synthetic Polypeptide
QITLKESGPTLVKPTQTLTLTCTFSGFSLSTSNMGVGWIRQPPGKALEWLAHIWWDDDKYYSPSLKSRLTITKDTSKNQVVLTMTNMDPVDTATYYCVRSNYGYAWFAYWGQGTLVTVSS

SEQ ID NO: 2221 - protein, 115 aa, Artificial Sequence
  Synthetic Polypeptide
QVQLQQSGAELVRPGVSVKISCKGSGYRFTDYPIHWVKQSHAKSLEWIGIISTYYGDVTNNPKFRGKATMTVDKSSTTAYMELARLTSEDSAIYYCARNDLFAYWGQGTLVTVSA

SEQ ID NO: 2222 - protein, 119 aa, Artificial Sequence
  Synthetic Polypeptide
EVKLVESGGGLVKPGGSLKLSCAASGFTFSSYAMSWVRQIPEKRLEWVASISRGGTTYYPDSVKGRFTISRDNVRNILYLQMSSLRSEDTAMYYCGRYDYDGYYAMDYWGQGTSVTVSS

SEQ ID NO: 2223 - protein, 120 aa, Artificial Sequence
  Synthetic Polypeptide
EVKLQESGPELVKPGASVKMSCKASGYTFTSYVMHWVKQKPGQGLEWIGYINPYNDGTKYNEKFKGKATLTSDKSSSTAYMELSSLTSEDSAVYYCARWKIYYGNYEDYWGQGTPLTVSS

SEQ ID NO: 2224 - protein, 123 aa, Artificial Sequence
  Synthetic Polypeptide
QVQLVESGGGSVQPGRSLRLSCEASGFTFEAYAMHWVRQPPGKGLEWVSSINWNSGRIAYADSVKGRFTISRDNARNSLYLQMNSLRLEDTAFYYCAKDIRRFSTGGAEFEYWGQGTLVTVSS

SEQ ID NO: 2225 - protein, 126 aa, Artificial Sequence
  Synthetic Polypeptide
QVQLLESGGGVVQPGRSLRLSCAASGFTFSFYGMHWVRQAPGKGLEWVAAISYDGSNKYYADSVKGRFTISRDNSKNTLYLQMNSLRAEDTAVYYCAKRPNQFYCSDGRCYSIDYWGQGTLVTVSS

SEQ ID NO: 2226 - protein, 119 aa, Artificial Sequence
  Synthetic Polypeptide
QVQLKESGPGLVAPSQSLSITCTVSGFSLSSQGVYWVRQPPGKGLEWLGAIWAGGSTNYNSALMSRLSISKDNSKSQVFLKMNSLQTDDTAMYYCARVDGYRGYNMDYWGQGTSVTVSS

SEQ ID NO: 2227 - protein, 120 aa, Artificial Sequence
  Synthetic Polypeptide
QVQLVESGGGVVQPGRSLRLSCAASGFTFSSYAMHWVRQAPGKGLEWVAVISYDGSNKYYADSVKGRFTISRDNSKNTLYLQMNSLRAEDTAVYYCARAHNSSSWSFDYWGQGTLVTVSS

SEQ ID NO: 2228 - protein, 124 aa, Artificial Sequence
  Synthetic Polypeptide
EVRLQQSGPDLIKPGASVKMSCKASGYTFTGYVMHWVKQRPGQGLEWIGFINPYNDDIQSNERFRGKATLTSDKSSTTAYMELSSLTSEDSAVYYCARGAGYNFDGAYRFFDFWGQGTTLTVSS

SEQ ID NO: 2229 - protein, 119 aa, Artificial Sequence
  Synthetic Polypeptide
QVQLVESGAEVKKPGASVKVSCKASGYTFTGYYMHWVRQAPGQGLEWMGRINPNSGGTNYAQKFQGRVTMTRDTSISTAYMELSRLRSDDTAVYYCASPRGRGSAFDIWGQGTLVTVSS

SEQ ID NO: 2230 - protein, 118 aa, Artificial Sequence
  Synthetic Polypeptide
EVQLVESGGGVVQPGGSLRLSCAASGFTFSSYAMSWVRQAPGKGLEWVSAISGSGGSTYYADSVKGRFSISRDNSKNTLYLQMNSLRAEDTAVYYCARTRSSGAFDIWGQGTLVTVSS

SEQ ID NO: 2231 - protein, 119 aa, Artificial Sequence
  Synthetic Polypeptide
EVQLQQSGPELVKPGASVKISCKASGYSFTGYFMNWVKQSHGKSLEYIGRFNPYNGETLYNQKFKGKATLTVDKSSSTVHMELLSVTSEDSAVYYCGRSGNDDAMDYWGQGTSVTVSSA

SEQ ID NO: 2232 - protein, 123 aa, Artificial Sequence
  Synthetic Polypeptide
QVQLVQSGGGVVQPGRSLRLSCAASGFTFSSYAMHWVRQAPGKGLEWVAVISYDGSNKYYADSVKGRFTISRDNSKNTLYLQMNSLRAEDTAVYYCARELRFLEWSSDAFDIWGQGTMVTVSS

SEQ ID NO: 2233 - protein, 119 aa, Artificial Sequence
  Synthetic Polypeptide
QVQLVQSGAEVKKPGSSVKVSCKASGGTFSSYAISWVRQAPGQGLEWMGWINVGNGNAIYSQKFQGRVTITRDTSATTAYMELSSLRSEDTAVYYCARDGERAWDLDYWGQGTLVTVSS

SEQ ID NO: 2234 - protein, 118 aa, Artificial Sequence
  Synthetic Polypeptide
QVQLVQSGAEVRKPGSSVKVSCKASGGSFNNYPIFWVRQAPGQGFEWMGRIIPILGITAYAQKFQGRVTITADKSTSTAYMELNSLRSEDTAVYYCAGGDDLDAFDIWGQGTMVSVSS

SEQ ID NO: 2235 - protein, 121 aa, Artificial Sequence
  Synthetic Polypeptide
QLQVQESGPGLVKPSETLSLTCTVSGGSISNSYFSWGWIRQPPGKGLEWIGSFYYGEKTYYNPSLKSRATISIDTSKSQFSLKLSSVTAADTAVYYCPRGPTMIRGVIDSWGQGTLVTVSS

SEQ ID NO: 2236 - protein, 123 aa, Artificial Sequence
  Synthetic Polypeptide
QVQLVESGGGVVQPGRSLRLSCAASGFIFSRYGMHWVRQAPGKGLKWVAVIWYDGSNKLYADSVKGRFTISRDNSKNTLYLQMNSLRAEDTAVYYCARDYYDNSRHHWGFDYWGQGTLVTVSS

SEQ ID NO: 2237 - protein, 120 aa, Artificial Sequence
  Synthetic Polypeptide
QVQLQQSGAELVRPGTSVKVSCKASGYVFTNYWIEWIKQRPGQGLEWIGVMNPGSGETTYNEKFKGKATLTADKSSSTAYMQLSSLTSVDSAVYFCARDHDRDYYAMDYWGQGTSVTVSS

SEQ ID NO: 2238 - protein, 116 aa, Artificial Sequence
  Synthetic Polypeptide
QVQLQQSDAELVKPGASVKISCKASGYTFTDHAIHWVKQKPEQGLEWIGYFSPGNGDIKYNEKFKGKATLTADKSSSTAYMQLNSLTSEDSAVYFCKRSYGNYDYWGQGTTLTVSS

SEQ ID NO: 2239 - protein, 116 aa, Artificial Sequence
  Synthetic Polypeptide
QVQLVQSGAEVKKTGSSVKVSCKASGYTFTDHAIHVWRQAPGQALEWMGHFSPGNTDIKYNDKFKGRVTLTVDRSMSTAYMELSSLRSEDTAMYYCKTSTFFFDYWGQGTMVTVSS

SEQ ID NO: 2240 - protein, 121 aa, Artificial Sequence
  Synthetic Polypeptide
QIQLVQSGHEVKKPGASVKVSCKASGYTFTNYGMNWVRQAPGQGLEWMGWINTKTGEPTYAEEFKGRFVFSLETSASTAYLQISSLKAEDTAMYFCGRGGYGSSYWYFDVWGQGTTVTVSS

SEQ ID NO: 2241 - protein, 119 aa, Artificial Sequence
  Synthetic Polypeptide
QVQLQESGPGLVKPSETLSLTCTVSGGSISSYGVHWIRQPPGKGLEWIGVIWTSGVTDYNSALMGRVTISVDTSKNQFSLKLSSVTAADTAVYYCARDGDYDRYTMDYWGQGTLVTVSS

SEQ ID NO: 2242 - protein, 126 aa, Artificial Sequence
  Synthetic Polypeptide
EVQLVESGGGLIQPGGSLRLSCAASGFTVSSNYMSWVRQAPGKGLEWVSVTYSGGSTSYADSVKGRFTISRDNSKNTLYLQMNSLRAEDTAVYYCARGGRYCSSISCYARSGCDYWGQGTLVTVSS

SEQ ID NO: 2243 - protein, 119 aa, Artificial Sequence
  Synthetic Polypeptide
QVQLVQSGAEVKKPGQSLKISCKASGYSLTDNWIGWVRQKPGKGLEWMGIIYPGDSDTRYSPSFQGQVTISADKSINTAYLQWSSLKASDTAIYYCVGLDWNYNPLRYWGPGTLVTVSS

SEQ ID NO: 2244 - protein, 117 aa, Artificial Sequence
  Synthetic Polypeptide
EVQLQQSGPELVKPGASMKISCKASGYSFSAYTMNWVKQSHGKNLEWIGLINPYNGGTNYNQEFEGKATLTVNKSSNTAFMELLSLTSDDSAVYYCARRDWDYFDYWGQGTTLTVSS

SEQ ID NO: 2245 - protein, 122 aa, Artificial Sequence
  Synthetic Polypeptide
QVQLVESGGGLVKPGGSLRLSCAASGFSITTSGYYWTWIRQFPGKGLEWMGYIGYNSKTYYNPALKSRITISRDNAKNSLYLQMNSLRAEDTAVYYCARSLYGGYKDAFDSWGQGTLVTVSS

SEQ ID NO: 2246 - protein, 121 aa, Artificial Sequence
  Synthetic Polypeptide
EVQLVESGGGVVQPGRSLRLSCAASGFTFRSYGMHWVRQAPGKGLEWVAVISYDGSNKYYTDSVNGRFTISRDNSKNTLYLQMNSLRAEDTAVYYCARGGGYYETSGPDYWGQGTLVTVSS

SEQ ID NO: 2247 - protein, 119 aa, Artificial Sequence
  Synthetic Polypeptide
QLQLQESGPGLVKPSGTLSLTCAVSGGSISSSNWWSWVRQPPGKGLEWIGEIYHSGSTNYNPSLKSRVTISVDKSKNQFSLKLSSVTAADTAVYYCVGSPYGDYVLDYWGQGTLVTVSS

SEQ ID NO: 2248 - protein, 123 aa, Artificial Sequence
  Synthetic Polypeptide
EVQLVETGGGVVQPGRSLRLSCAASGFTFSSYGMHWVRQAPGKGLEWVAVISYDGSNKYYADSVKGRFTISRDNSKNTLYLQMNSLRAEDTAVYYCAKDRYGWGSSFGHFDYWGQGTLVTVSS

SEQ ID NO: 2249 - protein, 123 aa, Artificial Sequence
  Synthetic Polypeptide
QVQLQQSGPGLVKPSQTLSLTCAISGDSVSGNSATWNWIRQSPSRGLEWLGRTYYRSKWNHDYAESVKSRITINPDTSKNQFSLQLNSVTPEDTAVYYCARGDSSSWYAFDYWGQGTLVTVSS

SEQ ID NO: 2250 - protein, 121 aa, Artificial Sequence
  Synthetic Polypeptide
QMQLVQSGAEVKEPGESLRISCKGSGYSFTNFWISWVRQMPGKGLEWMGRVDPGYSYSTYSPSFQGHVTISADKSTSTAYLQWNSLKASDTAMYYCARVQYSGYYDWFDPWGQGTLVTVSS

SEQ ID NO: 2251 - protein, 118 aa, Artificial Sequence
  Synthetic Polypeptide
QVQLVQSGAEVKKPGESLKISCKGSGYNFSNKWIGWVRQLPGRGLEWIAIIYPGYSDITYSPSFQGRVTISADTSINTAYLHWHSLKASDTAMYYCVRHTALAGFDYWGLGTLVTVSS

SEQ ID NO: 2252 - protein, 119 aa, Artificial Sequence
  Synthetic Polypeptide
QVQLVQSGAEVKKPGSSVKVSCKASGGTFSSYAISWVRQAPGQGLEWMGGIIPIFGTANYAQKFQGRVTITADESTSTAYMELSSLRSEDTAVYYCARRIPPYYGMDVWGQGTTVTVSS

SEQ ID NO: 2253 - protein, 121 aa, Artificial Sequence
  Synthetic Polypeptide
EVQLVQSGGGVMRPGGSLRLSCAASGFTFDDYGMSWVRQAPGKGLEWVSGINWNGGSTGYADSVRGRFTISRDNAKNSLYLQMNSLRAEDTALYYCARERGYGYHDPHDYWGQGTLVTVSS

SEQ ID NO: 2254 - protein, 121 aa, Artificial Sequence
  Synthetic Polypeptide
EVQLVQSGGGVVRPGGSLRLSCAASGFTFDDYGMSWVRQAPGKGLEWVSGINWNGGSTGYADSVRGRFTISRDNAKNSLYLQMNSLRAEDTALYYCARERGYGYHDPHDYWGQGTLVTVSS

SEQ ID NO: 2255 - protein, 120 aa, Artificial Sequence
  Synthetic Polypeptide
DVQLVESGGGLVQPGGSRKLSCAASGFTFSSFGMHWVRQAPEKGLEWVAYISSGSSTLHYADTVKGRFTISRDNPKNTLFLQMTSLRSEDTAMYYCARWGNYPHYAMDYWGQGTSVTVSS

SEQ ID NO: 2256 - protein, 119 aa, Artificial Sequence
  Synthetic Polypeptide
QVQLVESGGGVVQPGRSLRLSCAASGFTFSSYDMHWVRQAPGKGLEWVAVISYDGTNEYYADSVKGRFTISRDTSKNTLYLQMNSLRAEDTAVYYCARERYFDWSFDYWGQGTLVSVSS

SEQ ID NO: 2257 - protein, 118 aa, Artificial Sequence
  Synthetic Polypeptide
EVQLVQSGAEVKKPGASVKVSCKASGYTFTSYAMHWVRQAPGQRLEWMGWINAGNGNTKYSQKFQGRVTITRDTSASTAYMELSSLRSEDTAVYYCARDISYGSFDYWGQGTLVTVSS

SEQ ID NO: 2258 - protein, 121 aa, Artificial Sequence
  Synthetic Polypeptide
QVKLQQSGPELVKPGASVKISCKASGYSFTGYYMHWVKQSHGNILDWIGYIYPYNGVSSYNQKFKGKATLTVDKSSSTAYMELRSLTSEDSAVYYCARERGLYQLRAMDYWGQGTSVTVSS

SEQ ID NO: 2259 - protein, 113 aa, Artificial Sequence
  Synthetic Polypeptide
EVQLQESGPDLVKPSQSLSLTCTVTGYSITSGYGWHWIRQFPGNKLEWMGYIHYSGSTTYNPSLKSRISISRDTSKNQFFLQLNSVTTEDTATYYCARSLRYWGQGTTLTVSS

SEQ ID NO: 2260 - protein, 116 aa, Artificial Sequence
  Synthetic Polypeptide
EVQLVQSGAEVKKPGASVKVSCKASGYTFTNFWIHWVRQAPGQGLEWIGEIDPSDSYTNYNQKFKGRVTITRDTSTSTAYLELSSLRSEDTAVYYCAREITTVDYWGQGTLVTVSS

SEQ ID NO: 2261 - protein, 121 aa, Artificial Sequence
  Synthetic Polypeptide
EVQLVQSGAEVKKPGASVKVSCKASGYTFTSYWIGWVRQAPGQGLEWIGDIYPGGGYTNYNEKFKGRVTITRDTSTSTAYLELSSLRSEDTAVYYCARLDGSSYRGAMDSWGQGTLVTVSS

SEQ ID NO: 2262 - protein, 121 aa, Artificial Sequence [sequence omitted]

SEQ ID NO: 2263 - protein, 118 aa, Artificial Sequence
  Synthetic Polypeptide
EVQLVESGGGLAKPGGSLRLSCAASGFRFTFNNYYMDWVRQAPGQGLEWVSRISSSGDPTWYADSVKGRFTISRENAKNTLFLQMNSLRAEDTAVYYCASLTTGSDSWGQGVLVTVSS

SEQ ID NO: 2264 - protein, 119 aa, Artificial Sequence
  Synthetic Polypeptide
QVQLQQWGAGLLKPSETLSLTCAVFGGSFSGYYWSWIRQPPGKGLEWIGEINHRGNTNDNPSLKSRVTISVDTSKNQFALKLSSVTAADTAVYYCARERGYTYGNFDHWGQGTLVTVSS

SEQ ID NO: 2265 - protein, 120 aa, Artificial Sequence
  Synthetic Polypeptide
EVQLLESGGGLVQPGGSLRLSCAASGFTFSRYAMNWVRQAPGKGLEWVSGISGSGGRTYYADSVKGRFTISRDNSKNTLYLQMNSLRAEDTAVYYCAKDRDFWSGPFDYWGQGTLVTVSS

SEQ ID NO: 2266 - protein, 124 aa, Artificial Sequence
  Synthetic Polypeptide
QVQLQESGPGLVKPSETLSLTCTVSGYTITSGYDWSWIRQPPGKGLEWIGYINYGGSTNYKPSLGSRVTISVDTSKNQFSLKLSSVTAADTAVYYCARYNEYKSYIYDWYFDFWGQGTLVTVSS

SEQ ID NO: 2267 - protein, 124 aa, Artificial Sequence; identical to SEQ ID NO: 2266
  Synthetic Polypeptide

SEQ ID NO: 2268 - protein, 118 aa, Artificial Sequence
  Synthetic Polypeptide
QVQLVQSGAEVKKPGASVKVSCKASGYTFTSYDVHWVRQAPGQRLEWMGWLHADTGITKFSQKFQGRVTITRDTSASTAYMELSSLRSEDTAVYYCARERIQLWFDYWGQGTLVTVSS

SEQ ID NO: 2269 - protein, 124 aa, Artificial Sequence
  Synthetic Polypeptide
EVQLVESGGSLVQPGGSLRLSCAASGFTFDDYAMSWVRQVPGKGLEWVSSINWSGTHTDYADSVKGRFTISRNNANNTLYLQMNSLKSEDTAVYYCAKNWRDAGTTWFEKSGSAGQGTQVTVSS

SEQ ID NO: 2270 - protein, 118 aa, Artificial Sequence
  Synthetic Polypeptide
EVQLVESGGGLVQAGGSLRLSCAASGITFSINTMGWYRQAPGKQRELVALISSIGDTYYADSVKGRFTISRDNAKNTVYLQMNSLKPEDTAVYYCKRFRTAAQGTDYWGQGTQVTVSS

SEQ ID NO: 2271 - protein, 119 aa, Artificial Sequence
  Synthetic Polypeptide
EVQLVESGGGLVQPGGSLRLSCAASGSIFGFNDMAWYRQAPGKQRELVALISRVGVTSSADSVKGRFTISRVNAKDTVYLQMNSLKPEDTAVYYCYMDQRLDGSTLAYWGQGTQVTVSS

SEQ ID NO: 2272 - protein, 120 aa, Artificial Sequence
  Synthetic Polypeptide
DVQLVESGGGLVQPGGSLRLSCAASGSIGGLNAMAWYRQAPGKERELVAGIFGVGSTRYADSVKGRFTISRDNSKNTVYLQMNSLRPEDTAVYYCRMSSVTRGSSDYWGQGTLVTVSSLE

SEQ ID NO: 2273 - protein, 125 aa, Artificial Sequence
  Synthetic Polypeptide
EVQLVESGGGLVQPGGSLRLSCAASGRTYYLNAMGWFRQAPGKEREFVAAIDWSEGNKDYADSVKGRFTISRDNSKNTVYLQMNSLRPEDTAVYYCAADTPPWGPLIYIESYDSWGQGTLVTVSS

SEQ ID NO: 2274 - protein, 123 aa, Artificial Sequence
  Synthetic Polypeptide
EVQLVESGGGSVQAGGSLRLSCAASGDTYGSYWMGWFRQAPGKEREGVAAINRGGGYTVYADSVKGRFTISRDTAKNTVYLQMNSLRPDDTADYYCAASGVLGGLHEDWFNYWGQGTLVTVSS

SEQ ID NO: 2275 - protein, 122 aa, Artificial Sequence
  Synthetic Polypeptide
VQLVESGGGSVQAGGSLRLSCAASGDTYGSYWMGWFRQAPGQEREAVAAINRGGGYTVYADSVKGRFTISRDNAKNTLYLQMNSLRPDDTADYYCAASGVLGGLHEDWFNYWGQGTLVTVSS

SEQ ID NO: 2276 - protein, 124 aa, Artificial Sequence
  Synthetic Polypeptide
EVQLVESGGGSVQTGGSLRLTCAASGRTSRSYGMGWFRQAPGKEREFVSGISWRGDSTGYADSVKGRFTISRDNAKNTVDLQMNSLKPEDTAIYYCAAAAGSAWYGTLYEYDYWGQGTLVTVSS

SEQ ID NO: 2277 - protein, 124 aa, Artificial Sequence
  Synthetic Polypeptide
EVQLVESGGGSVQAGGSLRLTCAASGSTSRSYGMGWFRQAPGKEREFVSGISWRGDSTGYADSVKGRFTISRDNAKNTVDLQMNSLKPEDTAIYYCAAAAGSTWYGTLYEYDYWGQGTLVTVSS

SEQ ID NO: 2278 - protein, 125 aa, Artificial Sequence
  Synthetic Polypeptide
DVQLVESGGGLVQPGGSLRLSCAASGFILDYYAIGWFRQAPGKEREGVLCIDASDDITYYADSVKGRFTISRDNSKNTVYLQMNSLRPEDTAVYYCATPIGLSSSCLLEYDYDYWGQGTLVTVSS

SEQ ID NO: 2279 - protein, 126 aa, Artificial Sequence
  Synthetic Polypeptide
EVQLVESGGGLVQAGDSLRLSCAASGRAFSRYAMGWFRQAPGKEREFVAAIGWGPSKTNYADSVKGRFTISRDNAKNTVYLQMNTLKPEDTAVYSCAAKFVNTDSTWSRSEMYTYWGQGTLVTVSS

SEQ ID NO: 2280 - protein, 122 aa, Artificial Sequence
  Synthetic Polypeptide
EVQLVESGGGLVQAGGSLRLSCVASGISSSKRNMGWYRQAPGKQRESVATISSGGNKDYTDAVKDRFTISRDTTKNTVYLQMNSLKPEDTAVYYCKIEAGTGWATRRGYTYWGQGTLVTVSS

SEQ ID NO: 2281 - protein, 112 aa, Artificial Sequence
  Synthetic Polypeptide
QVQLVQSGGGLVQPGGSLRLSCAASDFDFAAYEMSWVRQAPGQGLEWVAIISHDGIDKYYTDSVKGRFTISRDNSKNTLYLQMNTLRAEDTATYYCLRLGAVGQGTLVTVSS

SEQ ID NO: 2282 - protein, 120 aa, Artificial Sequence
  Synthetic Polypeptide
QVQLVQSGGGLVQPGGSLRLSCAASDFAFDDYEMSWVRQAPGKALEWIGDINHSGTTIYNPSLKSRVTISRDNSKNTLYLQMNTLRAEDTAIYYCARPHYGDYSDAFDIWGQGTMVTVSS

SEQ ID NO: 2283 - protein, 115 aa, Artificial Sequence [sequence omitted]

SEQ ID NO: 2284 - protein, 116 aa, Artificial Sequence
  Synthetic Polypeptide
EVQLVESGGGLVQAGGSLRLSCAASGSIFSGNVMGWYRRQAPGKEREWVAAIASGGSIYYRDSVKGRFTISRDNAKNTVYLQMNSLKPEDTAVYYCNSHPPTLPYWGLGTQVTVSS

SEQ ID NO: 2285 - protein, 126 aa, Artificial Sequence
  Synthetic Polypeptide
EVQLVESGGGSVQAGGSLRLSCTTSGRALNMYVMGWFRQAPGNEREFVAATSSSGGSTSYPDSVKGRFTISRDNAKNTVYLQMNSLKPEDTAAYRCAASPYVSTPTMNILEEYRYWGLGTQVTVSS

SEQ ID NO: 2286 - protein, 121 aa, Artificial Sequence [sequence omitted]

SEQ ID NO: 2287 - protein, 266 aa, Artificial Sequence
  Synthetic Polypeptide
EVQLVESGGGSVQTGGSLRLTCAASGRTSRSYGMGWFRQAPGKEREFVSGISWRGDSTGYADSVKGRFTISRDNAKNTVDLQMNSLKPEDTAIYYCAAAAGSAWYGTLYEYDYWGQGTLVTVSSLEGGGGSGGGGSGGGGSFEEVQLVESGGGSVQAGGSLRLSCAASGDTYGSYWMGWFRQAPGKEREGVAAINRGGGYTVYADSVKGRFTISRDTAKNTVYLQMNSLRPDDTADYYCAASGVLGGLHEDWFNYWGQGTLVTVSS

SEQ ID NO: 2288 - protein, 285 aa, Artificial Sequence
  Synthetic Polypeptide
EVQLVESGGGSVQAGGSLRLTCAASGSTSRSYGMGWFRQAPGKEREFVSGISWRGDSTGYADSVKGRFTISRDNAKNTVDLQMNSLKPEDTAIYYCAAAAGSTWYGTLYEYDYWGQGTLVTVSSLEGGGGSGGGGSGGGGSGSGGSGSGGSGSGGSGSGGSFEVQLVESGGGSVQAGGSLRLSCAASGDTYGSYWMGWFRQAPGQEREAVAAINRGGGYTVYADSVKGRFTISRDNAKNTLYLQMNSLRPDDTADYYCAASGVLGGLHEDWFNYWGQGTLVTVSS

SEQ ID NO: 2289 - protein, 275 aa, Artificial Sequence
  Synthetic Polypeptide
EVQLVESGGGLVQAGGSLRLSCAASGITFSINTMGWYRQAPGKQRELVALISSIGDTYYADSVKGRFTISRDNAKNTVYLQMNSLKPEDTAVYYCKRFRTAAQGTDYWGQGTQVTVSSLEGGGGSGGGGSGGGGSGSGGSGSGGSGSGGSGSGGSFEVQLVESGGGLVQPGGSLRLSCAASGSIFGFNDMAWYRQAPGKQRELVALISRVGVTSSADSVKGRFTISRVNAKDTVYLQMNSLKPEDTAVYYCYMDQRLDGSTLAYWGQGTQVTVSS

SEQ ID NO: 2290 - protein, 242 aa, Artificial Sequence
  Synthetic Polypeptide
DIQMTQSPSSLSASVGDRVTITCRASQDVNTAVAWYQQKPGKAPKLLIYSASFLESGVPSRFSGSRSGTDFTLTISSLQPEDFATYYCQQHYTTPPTFGQTKVEIKRGGGGSGGGGSGGGGSEVQLVESGGGLVQPGGSLRLSCAASGFNIKDTYIHWVRQAPGKGLEWVARIYPTNGYTRYADSVKGRFTISADTSKNTAYLQMNSLRAEDTAVYYCSRWGGDGFYAMDVWGQGTLVTVSS

SEQ ID NO: 2291 - protein, 280 aa, Artificial Sequence
  Synthetic Polypeptide
DVQLVESGGGLVQPGGSLRLSCAASGSIGGLNAMAWYRQAPGKERELVAGIFGVGSTRYADSVKGRFTISRDNSKNTVYLQMNSLRPEDTAVYYCRMSSVTRGSSDYWGQGTLVTVSSLEGGGGSGGGGSGGGGSGSGGSGSGGSGSGGSGSGGSFEVQLVESGGSLVQPGGSLRLSCAASGFTFDDYAMSWVRQVPGKGLEWVSSINWSGTHTDYADSVKGRFTISRNNANNTLYLQMNSLKSEDTAVYYCAKNWRDAGTTWFEKSGSAGQGTQVTVSS

SEQ ID NO: 2292 - protein, 288 aa, Artificial Sequence
  Synthetic Polypeptide
DVQLVESGGGLVQPGGSLRLSCAASGFILDYYAIGWFRQAPGKEREGVLCIDASDDITYYADSVKGRFTISRDNSKNTVYLQMNSLRPEDTAVYYCATPIGLSSSCLLEYDYDYWGQGTLVTVSSLEGGSGSGGGGSGGGGSGSGGSGSGGSGSGGSGSGGSFEVQLVESGGGLVQPGGSLRLSCAASGRTYYLNAMGWFRQAPGKEREFVAAIDWSEGNKDYADSVKGRFTISRDNSKNTVYLQMNSLRPEDTAVYYCAADTPPWGPLIYIESYDSWGQGTLVTVSS

SEQ ID NO: 2293 - protein, 271 aa, Artificial Sequence
  Synthetic Polypeptide
QVQLVQSGGGLVQPGGSLRLSCAASDFDFAAYEMSWVRQAPGQGLEWVAIISHDGIDKYYTDSVKGRFTISRDNSKNTLYLQMNTLRAEDTATYYCLRLGAVGQGTLVTVSSLEGGGGSGGGGSGGGGSGSGGSGSGGSGSGGSGSGGSFEQVQLVQSGGGLVQPGGSLRLSCAASDFAFDDYEMSWVRQAPGKALEWIGDINHSGTTIYNPSLKSRVTISRDNSKNTLYLQMNTLRAEDTAIYYCARPHYGDYSDAFDIWGQGTMVTVSS

SEQ ID NO: 2294 - protein, 124 aa, Artificial Sequence
  Synthetic Polypeptide
GSDLGIKLLFAAAKGQDDEVRILLAAGADVNAKDFEGYTPLHVAAYDGHLEIVEVLLKAGADVNAKDSQGRTPLHEAAYSGHLEIVEVLLKAGADVNAQDDAGETPADLAAAWGHEDIAEVLQK

SEQ ID NO: 2295 - protein, 126 aa, Artificial Sequence
  Synthetic Polypeptide
RSDLGKKLLEAARAGQDDEVRILMANGADVNAKDEYGLTPLYLATAHGHLEIVEVLLKNGADVNAVDAIGFTPLHLAAFIGHLEIAEVLLKHGADVNAQDKFGKTAFDISIGNGNEDLAEILQKLN

SEQ ID NO: 2296 - protein, 58 aa, Artificial Sequence
  Synthetic Polypeptide
VDNKFNKERYSAYYEIWQLPNLNVRQKAAFIGSLQDDPSQSANLLAEAKKLNDAQAPK

SEQ ID NO: 2297 - protein, 51 aa, Artificial Sequence
  Synthetic Polypeptide
YAKEMRNAYWEIALLPNLTNQQKRAPIRKLYDDPSQSSELLSEAKKLNDSQ

SEQ ID NO: 2298 - protein, 51 aa, Artificial Sequence
  Synthetic Polypeptide
YAKEMWIAWEEIRNLPNLNGWQMTAFIAKLLDDPSQSSELLSEAKKLNDSQ

SEQ ID NO: 2299 - protein, 269 aa, Artificial Sequence
  Synthetic Polypeptide
EPLVVKVEEGDNAVLQCLKGTSDGPTQQLTWSRESPLKPFLKLSLGLPGLGIHMRPLAIWLFIFNVSQQMGGFYLCQPGPPSEKAWQPGWTVNVEGSGELFRWNVSDLGGLGCGLKNRSSEGPSSPSGKLMSPKLYVWAKDRPEIWEGEPPCLPPRDSLNQSLSQDLTMAPGSTLWLSCGVPPDSVSRGPLSWTHVHPKGPKSLLSLELKDDRPARDMWVMETGLLLPRATAQDAGKYYCHRGNLTMSFHLEITARPVLWHWLLRTGGW

SEQ ID NO: 2300 - protein, 490 aa, Artificial Sequence
  Synthetic Polypeptide
MPSWALFMVTSCLLLAPQNLAQVSSQDVSLLASDSEPLKCFSRTFEDLTCFWDEEEAAPSGTYQLLYAYPREKPRACPLSSQSMPHFGTRYVCQFPDQEEVRLFFPLHLWVKNVFLNQTRTQRVLFVDSVGLPAPPSIIKAMGGSQPGELQISWEEPAPEISDFLRYELRYGPRDPKNSTGPTVIQLIATETCCPALQRPHSASALDQSPCAQPTMPWQDGPKQTSPSREASALTAEGGSCLISGLQPGNSYWLQLRSEPDGISLGGSWGSWSLPVTVDLPGDAVALGLQCFTLDLKNVTCQWQQQDHASSQGFFYHSRARCCPRDRYPIWENCEEEEKTNPGLQTPQFSRCHFKSRNDSIIHILVEVTTAPGTVHSYLGSPFWIHQAVRLPTPNLHWREISSGHLELEWQHPSSWAAQETCYQLRYTGEGHQDWKVLEPPLGARGGTLELRPRSRYRLQLRARLNGPTYQGPWSSWSDPTRVETATETA

SEQ ID NO: 2301 - protein, 167 aa, Artificial Sequence
  Synthetic Polypeptide
MALPVTALLLPLALLLHAARPGWFLDSPDRPWNPPTFSPALLVVTEGDNATFTCSFSNTSESFVLNWYRMSPSNQTDKLAAFPEDRSQPGQDCRFRVTQLPNGRDFHMSVVRARRNDSGTYLCGAISLAPKAQIKESLRAELRVTERRAEVPTAHPSPSPRPAGQFQ

SEQ ID NO: 2302 - protein, 146 aa, Artificial Sequence
  Synthetic Polypeptide
GWFLDSPDRPWNPPTFSPALLVVTEGDNATFTCSFSNTSESFVLNWYRMSPSNQTDKLAAFPEDRSQPGQDCRFRVTQLPNGRDFHMSVVRARRNDSGTYLCGAISLAPKAQIKESLRAELRVTERRAEVPTAHPSPSPRPAGQFQ

SEQ ID NO: 2303 - protein, 167 aa, Artificial Sequence
  Synthetic Polypeptide
MQIPQAPWPVVWAVLQLGWRPGWFLDSPDRPWNPPTFSPALLVVTEGDNATFTCSFSNTSESFVLNWYRMSPSNQTDKLAAFPEDRSQPGQDCRFRVTQLPNGRDFHMSVVRARRNDSGTYLCGAISLAPKAQIKESLRAELRVTERRAEVPTAHPSPSPRPAGQFQ

SEQ ID NO: 2304 - protein, 162 aa, Artificial Sequence
  Synthetic Polypeptide
MACLGFQRHKAQLNLATRTWPCTLLFFLLFIPVFCKAMHVAQPAVVLASSRGIASFVCEYASPGKATEVRVTVLRQADSQVTEVCAATYMMGNELTFLDDSICTGTSSGNQVNLTIQGLRAMDTGLYICKVELMYPPPYYLGIGNGTQIYVIDPEPCPDSDF

SEQ ID NO: 2305 - protein, 241 aa, Artificial Sequence
  Synthetic Polypeptide
MRRAALWLWLCALALSLQPALPQIVATNLPPEDQDGSGDDSDNFSGSGAGALQDITLSQQTPSTWKDTQLLTAIPTSPEPTGLEATAASTSTLPAGEGPKEGEAVVLPEVEPGLTAREQEATPRPRETTQLPTTHQASTTTATTAQEPATSHPHRDMQPGHHETSTPAGPSQADLHTPHTEDGGPSATERAAEDGASSQLPAAEGSGEQDFTFETSGENTAVVAVEPDRRNQSPVDQGATG

SEQ ID NO: 2306 - protein, 300 aa, Artificial Sequence
  Synthetic Polypeptide
MVLLWLTLLLIALPCLLQTKEDPNPPITNLRMKAKAQQLTWDLNRNVTDIECVKDADYSMPAVNNSYCQFGAISLCEVTNYTVRVANPPFSTWILFPENSGKPWAGAENLTCWIHDVDFLSCSWAVGPGAPADVQYDLYLNVANRRQQYECLHYKTDAQGTRIGCRFDDISRLSSGSQSSHILVRGRSAAFGIPCTDKFVVFSQIEILTPPNMTAKCNKTHSFMHWKMRSHFNRKFRYELQIQKRMQPVITEQVRDRTSFQLLNPGTYTVQIRARERVYEFLSAWSTPQRFECDQEEGAN

SEQ ID NO: 2307 - protein, 709 aa, Artificial Sequence
  Synthetic Polypeptide
MGPWSRSLSALLLLLQVSSWLCQEPEPCHPGFDAESYTFTVPRRHLERGRVLGRVNFEDCTGRQRTAYFSLDTRFKVGTDGVITVKRPLRFHNPQIHFLVYAWDSTYRKFSTKVTLNTVGHHHRPPPHQASVSGIQAELLTFPNSSPGLRRQKRDWVIPPISCPENEKGPFPKNLVQIKSNKDKEGKVFYSITGQGADTPPVGVFIIERETGWLKVTEPLDRERIATYTLFSHAVSSNGNAVEDPMEILITVTDQNDNKPEFTQEVFKGSVMEGALPGTSVMEVTATDADDDVNTYNAAIAYTILSQDPELPDKNMFTINRNTGVISVVTTGLDRESFPTYTLVVQAADLQGEGLSTTATAVITVTDTNDNPPIFNPTTYKGQVPENEANVVITTLKVTDADAPNTPAWEAVYTILNDDGGQFVVTTNPVNNDGILKTAKGLDFEAKQQYILHVAVTNVVPFEVSLTTSTATVTVDVLDVNEAPIFVPPEKRVEVSEDFGVGQEITSYTAQEPDTFMEQKITYRIWRDTANWLEINPDTGAISTRAELDREDFEHVKNSTYTALIIATDNGSPVATGTGTLLLILSDVNDNAPIPEPRTIFFCERNPKPQVINIIDADLPPNTSPFTAELTHGASANWTIQYNDPTQESIILKPKMALEVGDYKINLKLMDNQNKDQVTTLEVSVCDCEGAAGVCRKAQPVEAGLQIPA

SEQ ID NO: 2308 - protein, 239 aa, Artificial Sequence
  Synthetic Polypeptide
MSAPRLLISIIIMVSASSSSCMGGKQMTQNYSTIFAEGNISQPVLMDINAVLCCPPIALRNLIIITWEIILRGQPSCTKAYKKETNETKETNCTVERITWVSRPDQNSDLQILPVDTTHDGYYRGIVVTPDGNFHRGYHLQVLVTPEVNLFQSRNITAVCKAVTGKPAAQISWIPEGSILATKQEYWGNGTVTVKSTCPWEGHKSTVTCHVSHLTGNKSLSVKLNSGLRTSGSPALSLL

SEQ ID NO: 2309 - protein, 488 aa, Artificial Sequence
  Synthetic Polypeptide
MECLYYFLGFLLLAARLPLDAAKRFHDVLGNERPSAYMREHNQLNGWSSDENDWNEKLYPVWKRGDMRWKNSWKGGRVQAVLTSDSPALVGSNITFAVNLIFPRCQKEDANGNIVYEKNCRNEAGLSADPYVYNWTAWSEDSDGENGTGQSHHNVFPDGKPFPHHPGWRRWNFIYVFHTLGQYFQKLGRCSVRVSVNTANVTLGPQLMEVTVYRRHGRAYVPIAQVKDVYVVTDQIPVFVTMFQKNDRNSSDETFLKDLPIMFDVLIHDPSHFLNYSTINYKWSFGDNTGLFVSTNHTVNHTYVLNGTFSLNLTVKAAAPGPCPPPPPPPRPSKPTPSLGPAGDNPLELSRIPDENCQINRYGHFQATITIVEGILEVNIIQMTDVLMPVPWPESSLIDFVVTCQGSIPTEVCTIISDPTCEITQNTVCSPVDVDEMCLLTVRRTFNGSGTYCVNLTLGDDTSLALTSTLISVPDRDPASPLRMANSA

SEQ ID NO: 2310 - protein, 664 aa, Artificial Sequence
  Synthetic Polypeptide
MGAARGSPARPRRLPLLSVLLLPLLGGTQTAIVFIKQPSSQDALQGRRALLRCEVEAPGPVHVYWLLDGAPVQDTERRFAQGSSLSFAAVDRLQDSGTFQCVARDDVTGEEARSANASFNIKWIEAGPVVLKHPASEAEIQPQTQVTLRCHIDGHPRPTYQWFRDGTPLSDGQSNHTVSSKERNLTLRPAGPEHSGLYSCCAHSAFGQACSSQNFTLSIADESFARVVLAPQDVVVARYEEAMFHCQFSAQPPPSLQWLFEDETPITNRSRPPHLRRATVFANGSLLLTQVRPRNAGIYRCIGQGQRGPPIILEATLHLAEIEDMPLFEPRVFTAGSEERVTCLPPKGLPEPSVWWEHAGVRLPTHGRVYQKGHELVLANIAESDAGVYTCHAANLAGQRRQDVNITVATVPSWLKKPQDSQLEEGKPGYLDCLTQATPKPTVVWYRNQMLISEDSRFEVFKNGTLRINSVEVYDGTWYRCMSSTPAGSIEAQARVQVLDGSSLPEWVTDNAGTLHFARVTRDDAGNYTCIASNGPQGQIRAHVQLTVAVFITFKVEPERTTVYQGHTALLQCEAQGDPKPLIQWKGKDRILDPTKLGPRMHIFQNGSLVIHDVAPEDSGRYTCIAGNSCNIKHTEAPLYVVDKPVPEESEGPGSPPPYKMIQT

SEQ ID NO: 2311 - protein, 252 aa, Artificial Sequence
  Synthetic Polypeptide
MPLLLLLPLLWAGALAMDPNFWLQVQESVTVQEGLCVLVPCTFFHPIPYYDKNSPVHGYWFREGAIISGDSPVATNKLDQEVQEETQGRFRLLGDPSRNNCSLSIVDARRRDNGSYFFRMERGSTKYSYKSPQLSVHVTDLTHRPKILIPGTLEPGHSKNLTCSVSWACEQGTPPIFSWLSAAPTSLGPRTTHSSVLIITPRPQDHGTNLTCQVKFAGAGVTTERTIQLNVTYVPQNPTTGIFPGDGSGKQE

SEQ ID NO: 2312 - protein, 290 aa, Artificial Sequence
  Synthetic Polypeptide
MLVRRGARAGPRMPRGWTALCLLSLLPSGFMSLDNNGTATPELPTQGTFSNVSTNVSYQETTTPSTLGSTSLHPVSQHGNEATTNITETTVKFTSTSVITSVYGNTNSSVQSQTSVISTVFTTPANVSTPETTLKPSLSPGNVSDLSTTSTSLATSPTKPYTSSSPILSDIKAEIKCSGIREVKLTQGICLEQNKTSSCAEFKKDRGEGLARVLCGEEQADADAGAQVCSLLLAQSEVRPQCLLLVLANRTEISSKLQLMKKHQSDLKKLGILDFTEQDVASHQSYSQKT

SEQ ID NO: 2313 - protein, 268 aa, Artificial Sequence
  Synthetic Polypeptide
MAPPQVLAFGLLLAAATATFAAAQEECVCENYKLAVNCFVNNNRQCQCTSVGAQNTVICSKLAAKCLVMKAEMNGSKLGRRAKPEGALQNNDGLYDPDCDESGLFKAKQCNGTSTCWCVNTAGVRRTDKDTEITCSERVRTYWIIIELKHKAREKPYDSKSLRTALQKEITTRYQLDPKFITSILYENNVITIDLVQNSSQKTQNDVDIADVAYYFEKDVKGESLFHSKKMDLTVNGEQLDLDPGQTLIYYVDEKAPEFSMQGLKQAR

SEQ ID NO: 2314 - protein, 265 aa, Artificial Sequence
  Synthetic Polypeptide
MSEEVTYADLQFQNSSEMEKIPEIGKFGEKAPPAPSHVWRPAALFLTLLCLLLLIGLGVLASMFHVTLKIEMKKMNKLQNISEELQRNISLQLMSNMNISNKIRNLSTTLQTIATKLCRELYSKEQEHKCKPCPRRWIWHKDSCYFLSDDVQTWQESKMACAAQNASLLKINNKNALEFIKSQSRSYDYWLGLSPEEDSTRGMRVDNIINSSAWVIRNAPDLNNMYCGYINRLYVQYYHCTYKQRMICEKMANPVQLGSTYFREA

SEQ ID NO: 2315 - protein, 163 aa, Artificial Sequence
  Synthetic Polypeptide
MALPVTALLLPLALLLHAARPFECPAGIYAPICSGGGGSCGGGGSKISHFLKMESLNFIRAHTPYINIYNCEPANPSEKNSPSTQYCYSIQSGGGGSCGGGGSPAGIYAPIGGGGSKISHFLKMESLNFIRAHTPYINIYNCEPANPSEKNSPSTQYCYSIQS

SEQ ID NO: 2316 - protein, 105 aa, Artificial Sequence
  Synthetic Polypeptide
MALPVTALLLPLALLLHAARPFECPAGIYAPICSGGGGSCGGGGSKISHFLKMESLNFIRAHTPYINIYNCEPANPSEKNSPSTQYCYSIQSGGGGSCGGGGSTR

SEQ ID NO: 2317 - protein, 515 aa, Artificial Sequence
  Synthetic Polypeptide
MSLWLLEGVPMRQAAVTSTSLTIKSVFTRSELKFSPQWSHHGKIVTCQLQDADGKFLSNDTVQLNVKHTPKLEIKVTPSDAIVREGDSVTMTCEVSSSNPEYTTVSWLKDGTSLKKQNTFTLNLREVTKDQSGKYCCQVSNDVGPGRSEEVFLQVQYAPEPSTVQILHSPAVEGSQVEFLCMSLANPLPTNYTWYHNGKEMQGRTEEKVHIPKILPWHAGTYSCVAENILGTGQRGPGAELDVQYPPKKVTTVIQNPMPIREGDTVTLSCNYNSSNPSVTRYEWKPHGAWEEPSLGVLKIQNVGWDNTTIACAACNSWCSWASPVALNVQYAPRDVRVRKIKPLSEIHSGNSVSLQCDFSSSHPKEVQFFWEKNGRLLGKESQLNFDSISPEDAGSYSCWVNNSIGQTASKAWTLEVLYAPRRLRVSMSPGDQVMEGKSATLTCESDANPPVSHYTWFDWNNQSLPYHSQKLRLEPVKVQHSGAYWCQGTNSVGKGRSPLSTLTVYYSPETIGRR

SEQ ID NO: 2318 - protein, 413 aa, Artificial Sequence
  Synthetic Polypeptide
MRPADLLQLVLLLDLPRDLGGMGCSSPPCECHQEEDFRVTCKDIQRIPSLPPSTQTLKLIETHLRTIPSHAFSNLPNISRIYVSIDVTLQQLESHSFYNLSKVTHIEIRNTRNLTYIDPDALKELPLLKFLGIFNTGLKMFPDLTKVYSTDIFFILEITDNPYMTSIPVNAFQGLCNETLTLKLYNNGFTSVQGYAFNGTKLDAVYLNKNKYLTVIDKDAFGGVYSGPSLLDVSQTSVTALPSKGLEHLKELIARNTWTLKKLPLSLSFLHLTRADLSYPSHCCAFKNQKKIRGILESLMCNESSMQSLRQRKSVNALNSPLHQEYEENLGDSIVGYKEKSKFQDTHNNAHYYVFFEEQEDEIIGFGQELKNPQEETLQAFDSHYDYTICGDSEDMVCTPKSDEFNPCEDIMG

SEQ ID NO: 2319 - protein, 361 aa, Artificial Sequence
  Synthetic Polypeptide
MRPSGTAGAALLALLAALCPASRALEEKKGNYVVTDHGSCVRACGADSYEMEEDGVRKCKKCEGPCRKVCNGIGIGEFKDSLSINATNIKHFKNCTSISGDLHILPVAFRGDSFTHTPPLDPQELDILKTVKEITGFLLIQAWPENRTDLHAFENLEIIRGRTKQHGQFSLAVVSLNITSLGLRSLKEISDGDVIISGNKNLCYANTINWKKLFGTSGQKTKIISNRGENSCKATGQVCHALCSPEGCWGPEPRDCVSCRNVSRGRECVDKCNLLEGEPREFVENSECIQCHPECLPQAMNITCTGRGPDNCIQCAHYIDGPHCVKTCPAGVMGENNTLVWKYADAGHVCHLCHPNCTYGC

SEQ ID NO: 2320 - protein, 54 aa, Artificial Sequence
  Synthetic Polypeptide
MLQMAGQCSQNEYFDSLLHACIPCQLRCSSNTPPLTCQRYCNASVTNSVKGTNA

SEQ ID NO: 2321 - protein, 226 aa, Artificial Sequence
  Synthetic Polypeptide
MAGSPTCLTLIYILWQLTGSAASGPVKELVGSVGGAVTFPLKSKVKQVDSIVWTFNTTPLVTIQPEGGTIIVTQNRNRERVDFPDGGYSLKLSKLKKNDSGIYYVGIYSSSLQQPSTQEYVLHVYEHLSKPKVTMGLQSNKNGTCVTNLTCCMEHGEEDVIYTWKALGQAANESHNGSILPISWRWGESDMTFICVARNPVSRNFSSPILARKLCEGAADDPDSSM

SEQ ID NO: 2322 - protein, 135 aa, Artificial Sequence
  Synthetic Polypeptide
LFNQEVQIPLTESYCGPCPKNWICYKNNCYQFFDESKNWYESQASCMSQNASLLKVYSKEDQDLLKLVKSYHWMGLVHIPTNGSWQWEDGSILSPNLLTIIEMQKGDCALYASSFKGYIENCSTPNTYICMQRTV

SEQ ID NO: 2323 - protein, 187 aa, Artificial Sequence
  Synthetic Polypeptide
MELTELLLVVMLLLTARLTLSSPAPPACDLRVLSKLLRDSHVLHSRLSQCPEVHPLPTPVLLPAVDFSLGEWKTQMEETKAQDILGAVTLLLEGVMAARGQLGPTCLSSLLGQLSGQVRLLLGALQSLLGTQLPPQGRTTAHKDPNAIFLSFQHLLRGKVRFLMLVGGSTLCVRRAPPTTAVPSRTS

SEQ ID NO: 2324 - protein, 187 aa, Artificial Sequence
  Synthetic Polypeptide
MELTDLLLAAMLLAVARLTLSSPVAPACDPRLLNKLLRDSHLLHSRLSQCPDVDPLSIPVLLPAVDFSLGEWKTQTEQSKAQDILGAVSLLLEGVMAARGQLEPSCLSSLLGQLSGQVRLLLGALQGLLGTQLPLQGRTTAHKDPNALFLSLQQLLRGKVRFLLLVEGPTLCVRRTLPTTAVPSSTS

SEQ ID NO: 2325 - protein, 92 aa, Artificial Sequence
  Synthetic Polypeptide
APDVQDCPECTLQENPFFSQPGAPILQCMGCCFSRAYPTPLRSKKTMLVQKNVTSESTCCVAKSYNRVTVMGGFKVENHTACHCSTCYYHKS

SEQ ID NO: 2326 - protein, 165 aa, Artificial Sequence
  Synthetic Polypeptide
MEMFQGLLLLLLLSMGGTWASREMLRPRCRPINATLAVEKEGCPVCITVNTTICAGYCPTMTRVLQGVLPALPQVVCNYRDVRFESIRLPGCPRGVNPVVSYAVALSCQCALCRRSTTDCGGPKDHPLTCDDPRFQASSSSKAPPPSLPSPSRLPGPSDTPILPQ

SEQ ID NO: 2327 - protein, 111 aa, Artificial Sequence
  Synthetic Polypeptide
NSCELTNITIAIEKEECRFCISINTTWCAGYCYTRDLVYKDPARPKIQKTCTFKELVYETVRVPGCAHHADSLYTYPVATQCHCGKCDSDSTDCTVRGLGPSYCSFGEMKE

SEQ ID NO: 2328 - protein, 141 aa, Artificial Sequence
  Synthetic Polypeptide
MEMLQGLLLLLLLSMGGAWASREPLRPWCHPINAILAVEKEGCPVCITVNTTICAGYCPTMMRVLQAVLPPLPQVVCTYRDVRFESIRLPGCPRGVDPVVSFPVALSCRCGPCRRSTSDCGGPKDHPLTCDHPQLSGLLFL

SEQ ID NO: 2329 - protein, 138 aa, Artificial Sequence
  Synthetic Polypeptide
MTALFLMSMLFGLACGQAMSFCIPTEYTMHIERRECAYCLTINTTICAGYCMTRDINGKLFLPKYALSQDVCTYRDFIYRTVEIPGCPLHVAPYFSYPVALSCKCGKCNTDYSDCIHEAIKTNYCTKPQKSYLVGFSV

SEQ ID NO: 2330 - protein, 272 aa, Artificial Sequence
  Synthetic Polypeptide
MEMFQGLLLLLLLSMGGTWASREMLRPRCRPINATLAVEKEGCPVCITVNTTICAGYCPTMTRVLQGVLPALPQVVCNYRDVRFESIRLPGCPRGVNPVVSYAVALSCQCALCRRSTTDCGGPKDHPLTCDDPRFQASSSSKAPPPSLPSPSRLPGPSDTPILPQGGGGSGGGGSGGGGSAPDVQDCPECTLQENPFFSQPGAPILQCMGCCFSRAYPTPLRSKKTMLVQKNVTSESTCCVAKSYNRVTVMGGFKVENHTACHCSTCYYHKS

SEQ ID NO: 2331 - protein, 239 aa, Artificial Sequence
  Synthetic Polypeptide
MALPVTALLLPLALLLHAARPNSCELTNITIAIEKEECRFCISINTTWCAGYCYTRDLVYKDPARPKIQKTCTFKELVYETVRVPGCAHHADSLYTYPVATQCHCGKCDSDSTDCTVRGLGPSYCSFGEMKEGGGGSGGGGSGGGGSAPDVQDCPECTLQENPFFSQPGAPILQCMGCCFSRAYPTPLRSKKTMLVQKNVTSESTCCVAKSYNRVTVMGGFKVENHTACHCSTCYYHKS

SEQ ID NO: 2332 - protein, 248 aa, Artificial Sequence
  Synthetic Polypeptide
MEMLQGLLLLLLLSMGGAWASREPLRPWCHPINAILAVEKEGCPVCITVNTTICAGYCPTMMRVLQAVLPPLPQVVCTYRDVRFESIRLPGCPRGVDPVVSFPVALSCRCGPCRRSTSDCGGPKDHPLTCDHPQLSGLLFLGGGGSGGGGSGGGGSAPDVQDCPECTLQENPFFSQPGAPILQCMGCCFSRAYPTPLRSKKTMLVQKNVTSESTCCVAKSYNRVTVMGGFKVENHTACHCSTCYYHKS

SEQ ID NO: 2333 - protein, 245 aa, Artificial Sequence
  Synthetic Polypeptide
MTALFLMSMLFGLACGQAMSFCIPTEYTMHIERRECAYCLTINTTICAGYCMTRDINGKLFLPKYALSQDVCTYRDFIYRTVEIPGCPLHVAPYFSYPVALSCKCGKCNTDYSDCIHEAIKTNYCTKPQKSYLVGFSVGGGGSGGGGSGGGGSAPDVQDCPECTLQENPFFSQPGAPILQCMGCCFSRAYPTPLRSKKTMLVQKNVTSESTCCVAKSYNRVTVMGGFKVENHTACHCSTCYYHKS

SEQ ID NO: 2334 - protein, 242 aa, Artificial Sequence
  Synthetic Polypeptide
DIQMTQTTSSLSASLGDRVTISCRASQDISKYLNWYQQKPDGTVKLLIYHTSRLHSGVPSRFSGSGSGTDYSLTISNLEQEDIATYFCQQGNTLPYTFGGGTKLEITGGGGSGGGGSGGGGSEVKLQESGPGLVAPSQSLSVTCTVSGVSLPDYGVSWIRQPPRKGLEWLGVIWGSETTYYNSALKSRLTIIKDNSKSQVFLKMNSLQTDDTAIYYCAKHYYYGGSYAMDYWGQGTSVTVSS

SEQ ID NO: 2335 - protein, 242 aa, Artificial Sequence
  Synthetic Polypeptide
EIVMTQSPATLSLSPGERATLSCRASQDISKYLNWYQQKPGQAPRLLIYHTSRLHSGIPARFSGSGSGTDYTLTISSLQPEDFAVYFCQQGNTLPYTFGQGTKLEIKGGGGSGGGGSGGGGSQVQLQESGPGLVKPSETLSLTCTVSGVSLPDYGVSWIRQPPGKGLEWIGVIWGSETTYYNSSLKSRVTISKDNSKNQVSLKLSSVTAADTAVYYCAKHYYYGGSYAMDYWGQGTLVTVSS

SEQ ID NO: 2336 - protein, 243 aa, Artificial Sequence
  Synthetic Polypeptide
DEIVLTQSPATLSLSPGERATLSCSASSSVSYMHWYQQKPGQAPRLLIYDTSKLASGIPARFSGSGSGTDFTLTISSLEPEDVAVYYCFQGSVYPFTFGQGTKLEIKRGGGGSGGGGSGGGGSQVQLQESGPGLVKPSQTLSLTCTVSGGSISTSGMGVGWIRQHPGKGLEWIGHIWWDDDKRYNPALKSRVTISVDTSKNQFSLKLSSVTAADTAVYYCARMELWSYYFDYWGQGTLVTVSS

SEQ ID NO: 2337 - protein, 250 aa, Artificial Sequence
  Synthetic Polypeptide
DIQLTQSPASLAVSLGQRATISCKASQSVDYDGDSYLNWYQQIPGQPPKLLIYDASNLVSGIPPRFSGSGSGTDFTLNIHPVEKVDAATYHCQQSTEDPWTFGGGTKLEIKGGGGSGGGGSGGGGSQVQLQQSGAELVRPGSSVKISCKASGYAFSSYWMNWVKQRPGQGLEWIGQIWPGDGDTNYNGKFKGKATLTADESSSTAYMQLSSLASEDSAVYFCARRETTTVGRYYYAMDYWGQGTTVTVSS

SEQ ID NO: 2338 - protein, 249 aa, Artificial Sequence
  Synthetic Polypeptide
DIVMTQAAPSIPVTPGESVSISCRSSKSLLNSNGNTYLYWFLQRPGQSPQLLIYRMSNLASGVPDRFSGSGSGTAFTLRISRVEAEDVGVYYCMQHLEYPFTFGAGTKLELKRGGGGSGGGGSGGGGSEVQLQQSGPELIKPGASVKMSCKASGYTFTSYVMHWVKQKPGQGLEWIGYINPYNDGTKYNEKFKGKATLTSDKSSSTAYMELSSLTSEDSAVYYCARGTYYYGSRVFDYWGQGTTLTVSS

SEQ ID NO: 2339 - protein, 247 aa, Artificial Sequence
  Synthetic Polypeptide
EIVLTQSPDFQSVTPKEKVTITCRASESVDTFGISFMNWFQQKPDQSPKLLIHAASNQGSGVPSRFSGSGSGTDFTLTINSLEAEDAATYYCQQSKEVPFTFGGGTKVEIKGGGGSGGGGSGGGGSEVQLVESGGGLVQPGGSLRLSCAASGFTFSSSWMNWVRQAPGKGLEWVGRIYPGDGDTNYNGKFKGRFTISRDDSKNSLYLQMNSLKTEDTAVYYCARSGFITTVLDFDYWGQGTLVTVSS

SEQ ID NO: 2340 - protein, 243 aa, Artificial Sequence
  Synthetic Polypeptide
AIQLTQSPSSLSASVGDRVTITCRASQGISSAQQKPGKAPKLLILAWYSSLESGVPSRFSGYDASGSGTDFTLTISSLQPEDFATYYCQQFNSYPYTFGQGTKLEIKGGGGSGGGGSGGGGSEVQLVQSGAEVKKPGESLKISCKGSGYSFSSSWIGWVRQMPGKGLEWMGIIYPDDSDTRYSPSFQGQVTISADKSIRTAYLQWSSLKASDTAMYYCARHVTMIWGVIIDFWGQGTLVTVSS

SEQ ID NO: 2341 - protein, 267 aa, Artificial Sequence
  Synthetic Polypeptide
INIYNAEPANPSEKNSPEFDIVMTQSPATLSLSPGERATLSCRSSKSLQNVNGNTYLYWFQQKPGQSPQLLIYRMSNLNSGVPDRFSGSGSGTEFTLTISSLEPEDFAVYYCMQHLEYPITFGAGTKLEIKGGGGSGGGGSGGGGSEVQLVESGGGLVKPGGSLKLSCAASGYTFTSYVMHWVRQAPGKGLEWIGYINPYNDGTKYNEKFQGRVTISSDKSISTAYMELSSLRSEDTAMYYCARGTYYYGTRVFDYWGQGTLVTVSS

SEQ ID NO: 2342 - protein, 249 aa, Artificial Sequence
  Synthetic Polypeptide
DILLTQSPATLSLSPGERATLSCRASQSVDYDGDSYLNWYQQKPGQPPKLLIYDASNLVSGIPPRFSGSGSGTDFTLTISRLEPEDFAVYHCQQSTEDPWTFGGGTKLEIKGGGGSGGGGSGGGGSQVQLVESGGGLVEPGGSLRLSCMSGYAFSSYWMNWVRQMPGKGLEWMGQIWPGDGDTNYNPSLKSRVTITADESTSTAYMELSSLKAEDTAVYFCARRETTTVGRYYYAMDYWGQGTLVTVSS

SEQ ID NO: 2343 - protein, 246 aa, Artificial Sequence
  Synthetic Polypeptide
DILLTQSPATLSLSPGERATLSCRASQSVDNYGISFMNWYQQKPGQPPKLLIYAASNQGSGIPSRFSGSGSGTDFTLTISSLEPEDFAMYFCQQSNEVPRTFGGGTKLEIKGGGGSGGGGSGGGGSQVQLVESGGGLVEPGGSLRLSCMSGYAFSSSWMNWVRQMPGKGLEWMGRIYPGDGDTNYNGKFKERVTITADESTSTAYMELSSLKAEDTAVYFCARSEYWGNYWAMDYWGQGTLVTVSS

SEQ ID NO: 2344 - protein, 245 aa, Artificial Sequence
  Synthetic Polypeptide
DILLTQSPATLSLSPGERATLSCKASQNVGTNVAWYQQKPGQPPKLLIYSATYRNSGIPARFSGSGSGTEFTLTITNVQSKDLADYFYFCQYNRYPYTSGGGTKLEIKRGGGGSGGGGSGGGGSQVQLVESGGGLVEPGGSLRLSCMSGYAFSSYWMNWVRQMPGKGLEWMGQIYPGDGDTNYNGKFKGRVTITADESTSTAYMELSSLKAEDTAVYFCARKTISSVVDFYFDNWGQGTLVTVSS

SEQ ID NO: 2345 - protein, 258 aa, Artificial Sequence
  Synthetic Polypeptide
INIYNAEPANPSEKNSPEFQIVLTQSPATLSASPGEKATMTCSASSGVNYMHWYQQKPGTSPKRWIYDTDKTASGVPARFSGSGSGTSYSLTISSMEAEDAATYYCHQRGSYTFGGGTKLEIKGGGGSGGGGSGGGGSQVQLEQPGAEVVKPGASVKVSCKTSGYTFTSNWMHWVKQTPGKGLEWIGEIDPSDSYTNYNQKFDGKAKLTVDKSSSTAYMEVSDLTAEDSATYYCARGSNPYYYAMDYWGQGTSVTVSS

SEQ ID NO: 2346 - protein, 244 aa, Artificial Sequence
  Synthetic Polypeptide
DIQMTQSPSSLSASVGDRVTITCKASDHINNWLAWYQQKPGQAPKLLIYGATTLETGVPSRFSGSGSGTDYTLTISSLQPEDFATYYCQQSWNTPWTFGQGTKLEIKRGGGGSGGGGSGGGGSQVQLQQPGAELVKPGASVKMSCKASGYAFSSYWINWMKQKPGQGLEWIGQIYPGDGDTNYNGKFKGRATLTADTSSSTAYMQLSSLTSEDSAVYFCARSITTVVGCAMDYWGQGTSVTVSS

SEQ ID NO: 2347 - protein, 252 aa, Artificial Sequence
  Synthetic Polypeptide
DDIQLTQSPSSLSASVGDRVTITCKASQSVDYDGDSYLNWYQQIPGKAPKLLIYDASNLVSGIPPRFSGSGSGTDYTFTISSLQPEDIATYHCQQSTEDPWTFGGGTKLQIKRGGGGSGGGGSGGGGSQVQLQQSGAEVKKPGSSVKVSCKASGYAFSSYWMNWVRQRPGQGLEWIGQIWPGDGDTNYNGKFKGRATITADESTNTAYMELSSLRSEDTAFYSCARRETTTVGRYYYAMDYWGQGTTVTVSS

SEQ ID NO: 2348 - protein, 243 aa, Artificial Sequence
  Synthetic Polypeptide
QSVLTQPASVSGSPGQSITISCTGTSSDVGGYNYVSWYQQHPGKAPKLMIYDVNNRPSEVSNRFSGSKSGNTASLTISGLQAEDEADYYCSSYTTGSRAVFGGGTKLTVLGGGGGSGGGGSGGGGSEVQLVQSGAEVKKPGESLTISCKASGYSFPNYWITWVRQMSGGGLEWMGRIDPGDSYTTYNPSFQGHVTISIDKSTNTAYLHWNSLKASDTAMYYCARYYVSLVDIWGQGTLVTVSS

SEQ ID NO: 2349 - protein, 249 aa, Artificial Sequence
  Synthetic Polypeptide
QSVVTQPPSVSAAPGQKVTISCSGSSSNIGNNYVSWYQQLPGTAPKLLIYDNNKRPSGIPDRFSGSKSGTSATLGITGLQTGDEADYYCGTWDGSLYTMLFGGGTKLTVLGGGGSGGGGSGGGGSEVQLVESGGGLVKPGGSLRLSCAASGFTFSNAWMSWVRQAPGKGLEWVGFIRSKAYGGTTEYAASVKGRFTISRDDSKSIAYLQMNNLKTEDTAVYYCARDGLYSSSWYDSDYWGQGTLVTVSS

SEQ ID NO: 2350 - protein, 254 aa, Artificial Sequence
  Synthetic Polypeptide
QSVLTQPPSVSGAPGQRVTISCTGSSSNIGAGYDVHWYQQLPGTAPKLLIFGNSNRPSGVPDRFSGFKSGTSASLAITGLQAEDEADYFCQSYDSSLSGSGVFGTGTKVTVLGGGGGSGGGGSGGGGSQMQLVQSGGGLVQPGRSLRLSCAASGFTFDDYAMHWVRQAPGKGLEWVSGISWNSGSIGYADSVKGRFTISRDNAKNSLYLQMNSLRAEDTALYYCAKDIHSGSYYGLLYYAMDVWGQGTTVTVSS

SEQ ID NO: 2351 - protein, 240 aa, Artificial Sequence
  Synthetic Polypeptide
YIHVTQSPSSLSVSIGDRVTINCQTSQGVGSDLHWYQHKPGRAPKLLIHHASSVEDGVPSRFSGTGFHTSFNLTINDLQADDIGTYYCQVLQSFGRGSRLDTKGGGGSGGGGSGGGGSRAHLVQSGTAMKKPGASVRVSCQTSGYTFTAHILFWFRQAPGRGLEWVGWIKPQYGAVNFGGGFRDRVTLTRDVYREIAYMDIRGLKPDDTAVYYCARDRSYGDSSWALDAWGQGTTVVVSA

SEQ ID NO: 2352 - protein, 251 aa, Artificial Sequence
  Synthetic Polypeptide
DVQMIQTPDSLAVSLGQRATISCRASESVDNYGISFMHWYQQKPGQSPKLLIYRASNLESGIPARFSGSGSRTDFTLTINPVETDDVATYYCQQNNKDPPTFGGGTKLEIKGGGGSGGGGSGGGGSGGGGSQVQLQQSGAELVKPGASVKISCKASGYAFSSYWMNWVKQRPGKGLEWIGQIYPGDGDTTYNGKFKGKATLTADKSSSTVYMQLNSLTSEDSAVYFCVRYYYGSSGYFDYWGQGTTLTVSS

SEQ ID NO: 2353 - protein, 242 aa, Artificial Sequence
  Synthetic Polypeptide
DVQMIQTPSSLSASLGDRVTISCRASQDIGNYLNWYQQKPDGTVKLLIYYTSRLHSGVPSRFSGSGSGTEYSLTISNLEQEDIATYFCQQGSALPPTFGGGTKLEINGGGGSGGGGSGGGGSALQLQQSGAELVRPGASVTLSCKASGYTFTDYEMHWVKQTPVHGLEWIGAIDPETGGTAYNQKFEGKAILTADKSSSTAYMELRSLTSEDSPVYYCARRRYYGSSSFDYWGQGTTLTVSS

SEQ ID NO: 2354 - protein, 250 aa, Artificial Sequence
  Synthetic Polypeptide
DVVMTQSPLSLPVTPGAPASISCRSSQSIVHSNGNTYLEWYLQKPGQSPKLLIYKVSNRFSGVPDRFSGSGSGTDFTLRISRVEAEDVGIYYCFQGSHVPPTFGPGTKLEIKGGGGSGGGGSGGGGSEVQLVESGGGLVQPGGSLRLSCSASGFTFSSFGMHWVRQAPGKGLEWVAYISSGSSTIYYGDTVKGRFTISRDNAKNSLFLQMSSLRAEDTAVYYCAREGGYYYGRSYYTMDYWGQGTTVTVS

SEQ ID NO: 2355 - protein, 246 aa, Artificial Sequence
  Synthetic Polypeptide
DIVLTQSPASLAVSLGQRATISCRASKSVSTSGYSYLHWYQQKPGQPPKLLIYLASNLESGVPARFSGSGSGTDFTLNIHPVEEEDAATYYCQHSRELPFTFGSGTKLEIKGGGGSGGGGSGGGGSQVQLVESGGGLVQPGGSLKLSCAASGFDFSRYWMSWVRQAPGKGLEWIGEINPTSSTINFTPSLKDKVFISRDNAKNTLYLQMSKVRSEDTALYYCARGNYYRYGDAMDYWGQGTSVTVS

SEQ ID NO: 2356 - protein, 244 aa, Artificial Sequence
  Synthetic Polypeptide
DIQMTQSPSSLSASVGDRVTITCSASQDISNYLNWYQQKPGKAPKLLIYYTSNLHSGVPSRFSGSGSGTDFTLTISSLQPEDFATYYCQQYRKLPWTFGQGTKLEIKRGGGGSGGGGSGGGGSQVQLVQSGAEVKKPGSSVKVSCKASGGTFSNYWMHWVRQAPGQGLEWMGATYRGHSDTYYNQKFKGRVTITADKSTSTAYMELSSLRSEDTAVYYCARGAIYDGYDVLDNWGQGTLVTVSS

SEQ ID NO: 2357 - protein, 244 aa, Artificial Sequence
  Synthetic Polypeptide
DIVLTQSPATLSLSPGDRATISCRASESVTILGSHLIYWYQQKPGQPPRLLIQLASNVQTGVPARFSGSGSRTDFTLTISSVEPEDFAVYYCLQSRTIPRTFGQGTKLEIKRGGGGSGGGGSGGGGSQVQLVQSGPEVKKPGESVKISCKASGYTFRHYSMNWVKQAPGQGLKWMGRINTESGVPIYADDFKGRFSFTVDTSASTAYLEISSLTSEDTAVYFCSNDYLYSLDFWGQGTTLTVSS

SEQ ID NO: 2358 - protein, 245 aa, Artificial Sequence
  Synthetic Polypeptide
QSVLTQPPSVSGAPGQRVTISCTGSSSNIGAGFDVHWYQQLPGTAPKLLIYGNSNRPSGVPDRFSGSKSGTSASLAITGLQAEDEADYYCQSYDSSLSGYVFGTGTKVTVLGGGGGSGGGGSGGGGSQVQLVQSGAEVKKPGASVKVSCKASGYTFTDYYMHWVRQAPGQRLEWMGWINPNSGGTNYAQKFQDRITVTRDTSSNTGYMELTRLRSDDTAVYYCARSPYSGVLDKWGQGTLVTVSS

SEQ ID NO: 2359 - protein, 243 aa, Artificial Sequence
  Synthetic Polypeptide
QAVLTQPPSASGTPGQRVTISCSGSSSNIGSYTVSWYQQLPGTAPKFLIYSNNQRPSGVPDRFSGSKSGTSASLAISGLQSEDEADYYCAAWDDSLNGYVFGTGTKVTVLGGGGGSGGGGSGGGGSEVQLVQSGAEVKKPGESLKISCKGSGYDFTTYWIGWVRQMPGKGLEWMGIIYPGDSDTRYSPSVRGRVTISADKSINTAYLQWSSLEASDTAMYYCARMWTFSQDGWGQGTLVTVSS

SEQ ID NO: 2360 - protein, 254 aa, Artificial Sequence
  Synthetic Polypeptide
LPVLTQPPSASGTPGQRVTISCSGRSSNIGSNSVNWYRQLPGAAPKLLIYSNNQRPPGVPVRFSGSKSGTSASLAISGLQSEDEATYYCATWDDNLNVHYVFGTGTKVTVLGSRGGGGSGGGGSGGGGSLEMAQVQLVQSGAEVKKPGSSVKVSCKASGGTFSSYAISWVRQAPGQGLEWMGRIIPILGIANYAQKFQGRVTITADKSTSTAYMELSSLRSEDTAVYYCARGGYYSHDMWSEDWGQGTLVTVSS

SEQ ID NO: 2361 - protein, 243 aa, Artificial Sequence
  Synthetic Polypeptide
DIVLTQSPASLAVSLGERATINCRASESVSVIGAHLIHWYQQKPGQPPKLLIYLASNLETGVPARFSGSGSGTDFTLTISSLQAEDAAIYYCLQSRIFPRTFGQGTKLEIKGGGGSGGGGSGGGGSQVQLVQSGSELKKPGESVKISCKASGYTFTDYSINWVKQAPGQGLKWMGWINTETREPAYAYDFRGRFVFSLDTSASTAYLQISSLKAEDTAVYFCALDYSYAMDYWGQGTLVTVSS

SEQ ID NO: 2362 - protein, 244 aa, Artificial Sequence
  Synthetic Polypeptide
DIVLTQSPATLSLSPGDRATLSCRASESVTILGSHLIYWYQQKPGQAPRLLIQLASNVQTGIPARFSGSGSRTDFTLTISSLEPEDFAVYYCLQSRTIPRTFGQGTKLEIKRGGGGSGGGGSGGGGSQVQLVQSGSELKKPGESVKISCKASGYTFTHYSMNWVRQAPGQGLEWMGRINTETGEPLYADDFKGRFVFSLDTSASTAYLQISSLKAEDTAVYYCSNDYLYSLDYWGQGTLVTVSS

SEQ ID NO: 2363 - protein, 245 aa, Artificial Sequence
  Synthetic Polypeptide
DIVMTQSPDSLAVSLGERATINCKSSQSILYSSNQKNYLAWYQQKPGQSPKLLIYWASTRESGVPDRFSGSGSGTDFTLTISSLQAEDVAVYYCHQYISSYTFGQGTKLEIKGGGGSGGGGSGGGGSQVQLVQSGAEVKKPGASVKVSCKASGYTFASQWMHWMRQAPGQGLEWIGWINPGNVNTKYNEKFKGRATLTVDTSTNTAYMELSSLRSEDTAVYYCARSTWYRPLDYWGQGTLVTVSS

SEQ ID NO: 2364 - protein, 245 aa, Artificial Sequence
  Synthetic Polypeptide
DHIVLTQSPSSLSASLGDRVTISCRASQDISTYLNWYQQKPDGTVKLLIFYTSRLHAGVPSRFSGSGSGTHHSLTISNLEQEDIATYFCQQGNSLPFTFGSGTKLEIKRGGGGSGGGGSGGGGSQVQLKESGPELEKPGASVKISCKASGYSFTAYSMNWVKQNNGMSLEWIGSIDPYYGDTKYAQKFKGKATLTVDKASSTAYLQLKSLTSEDSAVYYCARRMITTGDWYFDVWGAGTTVTVSS

SEQ ID NO: 2365 - protein, 245 aa, Artificial Sequence; identical to SEQ ID NO: 2364
  Synthetic Polypeptide

SEQ ID NO: 2366 - protein, 244 aa, Artificial Sequence
  Synthetic Polypeptide
EIVLTQSPATLSLSPGERATLSCRASQSVSSYLAWYQQKPGQAPRLLIYDASNRATGIPARFSGSGSGTDFTLTISSLEPEDFAVYYCQQRSNWPITFGQGTRLEIKGGGGSGGGGSGGGGSEVQLVESGGGLVQPGRSLRLSCAASGFTFNDYAMHWVRQAPGKGLEWVSTISWNSGSIGYADSVKGRFTISRDNAKKSLYLQMNSLRAEDTALYYCAKDIQYGNYYYGMDVWGQGTTVTVSS

SEQ ID NO: 2367 - protein, 247 aa, Artificial Sequence
  Synthetic Polypeptide
DIVMTQTPLSLPVTPGEPASISCRSSKSLLHSNGITYLYWYLQKPGQSPQLLIYQMSNLVSGVPDRFSGSGSGTDFTLKISRVEAEDVGVYYCAQNLELPYTFGGGTKVEIKRGGGGSGGGGSGGGGSQVQLVQSGAEVKKPGSSVKVSCKASGYAFSYSWINWVRQAPGQGLEWMGRIFPGDGDTDYNGKFKGRVTITADKSTSTAYMELSSLRSEDTAVYYCARNVFDGYWLVYWGQGTLVTVSS

SEQ ID NO: 2368 - protein, 248 aa, Artificial Sequence
  Synthetic Polypeptide
DIQMTQSPSSLSASVGDRVTITCRSSQSIVHSVGNTFLEWYQQKPGKAPKLLIYKVSNRFSGVPSRFSGSGSGTDFTLTISSLQPEDFATYYCFQGSQFPYTFGQGTKVEIKRGGGGSGGGGSGGGGSEVQLVESGGGLVQPGGSLRLSCAASGYEFSRSWMNWVRQAPGKGLEWVGRIYPGDGDTNYSGKFKGRFTISADTSKNTAYLQMNSLRAEDTAVYYCARDGSSWDWYFDVWGQGTLVTVSS

SEQ ID NO: 2369 - protein, 244 aa, Artificial Sequence
  Synthetic Polypeptide
DIVLTQSPAIITASPGEKVTMTCRASSSVNYMDWYQKKPGSSPKPWIYATSNLASGVPSRFSGSGSGTTYSMTISSLEAEDAATYYCQQWSFNPPTFGGGTKLEIKRGGGGSGGGGSGGGGSEVQLQQSGAELKKPGASVKVSCKASGYTFTSYNMHWVKQTPGQGLEWIGAIYPGNGDTSYNQKFKGKTTLTADKSSSTAYMELSSLRSEDTAVYYCARSNYYGSSYWFFDVWGTGTTVTVSS

SEQ ID NO: 2370 - protein, 247 aa, Artificial Sequence
  Synthetic Polypeptide
EIVLTQSPATLSLSPGERATLSCRASQSVSSYLAWYQQKPGQAPRLLIYDASNRATGIPARFSGSGSGTDFTLTISSLEPEDFAVYYCQQRSDWPLTFGGGTKVEIKGGGGSGGGGSGGGGSEVQLVQSGGGLVHPGGSLRLSCTGSGFTFSYHAMHWVRQAPGKGLEWVSIIGTGGVTYYADSVKGRFTISRDNVKNSLYLQMNSLRAEDMAVYYCARDYYGAGSFYDGLYGMDVWGQGTTVTVSS

SEQ ID NO: 2371 - protein, 245 aa, Artificial Sequence
  Synthetic Polypeptide
EIVLTQSPATLSLSPGERATLSCRASQSVSSYLAWYQQKPGQAPRLLIYDASNRATGIPARFSGSGSGTDFTLTISSLEPEDFAVYYCQQRSNWPLTFGGGTKVEIKGGGGSGGGGSGGGGSAVQLVESGGGLVQPGRSLRLSCAASGFTFGDYTMHWVRQAPGKGLEWVSGISWNSGSIGYADSVKGRFTISRDNAKNSLYLQMNSLRAEDTALYYCTKDNQYGSGSTYGLGVWGQGTLVTVSS

SEQ ID NO: 2372 - protein, 244 aa, Artificial Sequence
  Synthetic Polypeptide
DIQMTQSPSSLSASVGDRVTITCRASSSVSYMHWYQQKPGKAPKPLIYAPSNLASGVPSRFSGSGSGTDFTLTISSLQPEDFATYYCQQWSFNPPTFGQGTKVEIKRGGGGSGGGGSGGGGSEVQLVESGGGLVQPGGSLRLSCAASGYTFTSYNMHWVRQAPGKGLEWVGAIYPGNGDTSYNQKFKGRFTISVDKSKNTLYLQMNSLRAEDTAVYYCARVVYYSNSYWYFDVWGQGTLVTVSS

SEQ ID NO: 2373 - protein, 242 aa, Artificial Sequence
  Synthetic Polypeptide
DIQLTQSPSSLSASVGDRVTMTCRASSSVSYIHWFQQKPGKAPKPWIYATSNLASGVPVRFSGSGSGTDYTFTISSLQPEDIATYYCQQWTSNPPTFGGGTKLEIKGGGGSGGGGSGGGGSQVQLQQSGAEVKKPGSSVKVSCKASGYTFTSYNMHWVKQAPGQGLEWIGAIYPGNGDTSYNQKFKGKATLTADESTNTAYMELSSLRSEDTAFYYCARSTYYGGDWYFDVWGQGTTVTVSS

SEQ ID NO: 2374 - protein, 254 aa, Artificial Sequence
  Synthetic Polypeptide
STVMTQSPDSLAVSLGERATINCKSSQSNSNDVAWYQQKPGQSPKVLIYFASNRYSGVPDRFSGSGYGTDFTLTISSLQAEDVAVYFCQQDYSSPLTFGAGTKLELKRADAGGGGSGGGGSGGGGSQIQLVQSGSELKKPGASVKVSCKASGYTFTNFGVNWVRQAPGKGLEWMGWINTYTGEPSYAQGFTGRFVFSLDASVSTAYLQISSLKAEDTATYFCTRRTNYYGTSYYYAMDYWGQGTTVTVSSAKTT

SEQ ID NO: 2375 - protein, 246 aa, Artificial Sequence
  Synthetic Polypeptide
QIVLSQSPAILSASPGEKVTMTCRASSSVSYMHWYQQKPGSSPKPWIYATSNLASGVPARFSGSGSGTSYSFTISRVEAEDAATYYCQQWTFNPPTFGGGTRLEIKRTVAAGGGGSGGGGSGGGGSQAYLQQSGAELVRPGASVKMSCKASGYTFTSYNMHWVKQTPRQGLEWIGGIYPGNGDTSYNQKFKGKATLTVGKSSSTAYMQLSSLTSEDSAVYFCARYDYNYAMDYWGQGTSVTVSSAS

SEQ ID NO: 2376 - protein, 244 aa, Artificial Sequence; identical to SEQ ID NO: 2372
  Synthetic Polypeptide

SEQ ID NO: 2377 - protein, 243 aa, Artificial Sequence
  Synthetic Polypeptide
EIVLTQSPSSLSASVGDRVTITCRASSSLSFMHWYQQKPGKAPKPWIYATSNLASGVPSRFSGSGSGTDYTLTISSLQPEDFATYFCHQWSSNPLTFGGGTKVEIKGGGGSGGGGSGGGGSQVQLVQSGAEVKKPGASVKVSCKASGYTFTSYNMHWVRQAPGQRLEWIGAIYPGNGDTSYNQKFKGRVTVTRDTSANTAYMELSSLKSEDTAVYYCARSHYGSNYVDYFDYWGQGTLVTVSS

SEQ ID NO: 2378 - protein, 245 aa, Artificial Sequence
  Synthetic Polypeptide
DEIVLTQSPATLSLSPGERATLSCRASQSVSSYLAWYQQKPGQAPRLLIYDASNRATGIPARFSGSGSGTDFTLTISSLEPEDFAVYYCQQRSNWPITFGQGTRLEIKGGGGSGGGGSGGGGSEVQLVESGGGLVQPDRSLRLSCAASGFTFHDYAMHWVRQAPGKGLEWVSTISWNSGTIGYADSVKGRFTISRDNAKNSLYLQMNSLRAEDTALYYCAKDIQYGNYYYGMDVWGQGTTVTVSS

SEQ ID NO: 2379 - protein, 262 aa, Artificial Sequence
  Synthetic Polypeptide
DEIVLTQSPATLSLSPGERATLSCRASQSVSSYLAWYQQKPGQAPRLLIYDASNRATGIPARFSGSGSGTDFTLTISSLEPEDFAVYYCQQRSNWPITFGQGTRLEIKGGGGSGGGGSGGGGSFEAEPANPSEKNSPGGSEVQLVESGGGLVQPDRSLRLSCAASGFTFHDYAMHWVRQAPGKGLEWVSTISWNSGTIGYADSVKGRFTISRDNAKNSLYLQMNSLRAEDTALYYCAKDIQYGNYYYGMDVWGQGTTVTVSS

SEQ ID NO: 2380 - protein, 243 aa, Artificial Sequence
  Synthetic Polypeptide
EIVLTQSPGTLSLSPGERATLSCRASSSVPYIHWYQQKPGQAPRLLIYATSALASGIPDRFSGSGSGTDFTLTISRLEPEDFAVYYCQQWLSNPPTFGQGTKLELKRGGGGSGGGGSGGGGSEVQLVQSGAEVKKPGESLKLSCKGSGRTFTSYNMHWVRQMPGKGLEWMGAIYPLTGDTSYNQKSKLQVTISADKSISTAYLQWSSLKASDTAMYYCARSTYVGGDWQFDVWGKGTTVTVSS

SEQ ID NO: 2381 - protein, 240 aa, Artificial Sequence
  Synthetic Polypeptide
DIVMTQSPSSLSASVGDRVTITCKASQSVTNDVAWYQQKPGKAPKLLIYYASNRYTGVPSRFSGSGSGTDFTLTISSLQPEDFATYYCQQDYRSPWTFGGGTKVEIKRGGGGSGGGGSGGGGSQVQLEESGGGVVRPGRSLRLSCAASGFTFSDYGVNWIRQAPGKGLEWVTIIWGDGRTDYNSALKSRFTVSRNNSNNTLSLQMNSLTTEDTAVYYCVRAPGNRAMEYWGQGVLVTVSS

SEQ ID NO: 2382 - protein, 246 aa, Artificial Sequence
  Synthetic Polypeptide
DIQMTQSPSSLSASVGDRVTITCRASQTIWSYLNWYQQRPGKAPNLLIYAASSLQSGVPSRFSGRGSGTDFTLTISSLQAEDFATYYCQQSYSIPQIFGQGTKLEIKGGGGSGGGGSGGGGSQVQLQQSGPGLVKPSQTLSLTCAISGDSVSSNSAAWNWIRQSPSRGLEWLGRTYYRSKWYNDYAVSVKSRITINPDTSKNQFSLQLNSVTPEDTAVYYCAREVTGDLEDAFDIWGQGTMVTVSS

SEQ ID NO: 2383 - protein, 246 aa, Artificial Sequence
  Synthetic Polypeptide
QVQLQQSGPGLVKPSQTLSLTCAISGDSVSSNSAAWNWIRQSPSRGLEWLGRTYYRSKWYNDYAVSVKSRITINPDTSKNQFSLQLNSVTPEDTAVYYCAREVTGDLEDAFDIWGQGTMVTVSSGGGGSGGGGSGGGGSDIQMTQSPSSLSASVGDRVTITCRASQTIWSYLNWYQQRPGKAPNLLIYAASSLQSGVPSRFSGRGSGTDFTLTISSLQAEDFATYYCQQSYSIPQIFGQGTKLEIK

SEQ ID NO: 2384 - protein, 239 aa, Artificial Sequence
  Synthetic Polypeptide
DIQMTQSPATIENTSLSASVGDRVTITCRASQGISSWLTWYQQKPEKAPKSLIYAASSLQSGVPSRFSGSGSGTDFTLTISSLQPEDFATYYCQQYDSYPITFGQGTRLEIKGGGGSGGGGSGGGGSQVQLQQWGAGLLKPSETLSLTCAVYGGSFSAYYWSWIRQPPGKGLEWIGDINHGGGTNYNPSLKSRVTISVDTSKNQFSLKLNSVTAADTAVYYCASLTAYWGQGSLVTVSS

SEQ ID NO: 2385 - protein, 243 aa, Artificial Sequence
  Synthetic Polypeptide
EIVLTQSPDSLAVSLGERATINCKASQSVDFDGDSYLNWYQQKPGQPPKVLIYAASTLQSGVPSRFSGSGSGTDFTLTINSLEAEDAATYYCQQSNEDPWTFGGGTKVEIKGGGGSGGGGSGGGGSQVQLVQSGAEVKKPGASVKVSCKVSGYTFTDYYITWVRQAPGQALEWMGWIYPGSGNTKYSQKFQGRFVFSVDTSASTAYLQLSSLKAEDTAVYYCANYGNYWFAYWGQGTLVTVSS

SEQ ID NO: 2386 - protein, 241 aa, Artificial Sequence
  Synthetic Polypeptide
DIQMTQSPSSLSASVGDRVTITCRASQGISSWLAWYQQKPEKAPKSLIYAASSLQSGVPSRFSGSGSGTDFTLTISSLQPEDFATYYCQQYNSYPPTFGGGTKVEIKGGGGSGGGGSGGGGSEVQLVQSGGGLVHPGGSLRLSCAGSGFAFSSSTMHWIRQAPGKGLEWISLIGSGGGIYYGDSVKGRFTISRDNAKNSLYLQMNSLRAEDMAVYYCVRGYFDWVDYFDYWGQGTLVTVSS

SEQ ID NO: 2387 - protein, 250 aa, Artificial Sequence
  Synthetic Polypeptide
DIVMTQSPDSLTVSLGERTTINCKSSQSVLDSSKNKNSLAWYQQKPGQPPKLLLSWASTRESGIPDRFSGSGSGTDFTLTIDSLQPEDSATYYCQQSAHFPITFGQGTRLEIKGGGGSGGGGSGGGGSQVQLVQSGAEVKKPGASVKVSCKASGYTFTNYGMNWVKQAPGQGLKWMGWINTYTGEPTYADDFKGRVTMTSDTSTSTAYLELHNLRSDDTAVYYCARWSWSDGYYVYFDYWGQGTTVTVSS

SEQ ID NO: 2388 - protein, 246 aa, Artificial Sequence
  Synthetic Polypeptide
EIVLTQSPGSLAVSPGERVTMSCKSSQSVFFSSSQKNYLAWYQQIPGQSPRLLIYWASTRESGVPDRFTGSGSGTDFTLTISSVQPEDLAIYYCHQYLSSRTFGQGTKLEIKRGGGGSGGGGSGGGGSQVQLQQPGAEVVKPGASVKMSCKASGYTFTSYYIHWIKQTPGQGLEWVGVIYPGNDDISYNQKFQGKATLTADKSSTTAYMQLSSLTSEDSAVYYCAREVRLRYFDVWGQGTTVTVSS

SEQ ID NO: 2389 - protein, 273 aa, Artificial Sequence
  Synthetic Polypeptide
YINIYNAEPANPSEKNSPTQYAYGSGEFDIQLTQSPSSLSASVGDRVTITCRASQGISSVLAWYQQKPGKAPKLLIYDASSLESGVPSRFSGSGSGTDFTLTISSLQPEDFATYYCQQFNSSITFGQGTKLEIKRTVAAGGGGSGGGGSGGGGSQVQLVQSGAEVKKPGSSVKVSCKASGGTFSDYAISWVRQAPGQGLEWMGRIIPILGVANYAQKFQGRVTITADKSTRTAYMELSSLRSEDTAVYYCARNWADAFDIWGQGTMVTVSSAS

SEQ ID NO: 2390 - protein, 272 aa, Artificial Sequence
  Synthetic Polypeptide
YINIYNAEPANPSEKNSPTQYAYGSGEFDIVMTQSPSSLSASLGGKVTITCKASQDINKYIAWYQHKPGKGPRLLIHYTSTLQPGIPSRFSGSGSGRDYSFSISNLEPEDIATYYCLQYDNLLTFGAGTKLELKRGGGGSGGGGSGGGGSEVKLQQSGPELVKPGTSVKVSCKASGYSFTDYNMYWVKQSHGKSLEWIGYIDPYKGGTIYNQKFKGKATLTVDKSSSTAFMHLNSLTSEDSAVYYCAREMITAYYFDYWGQGSSVTVSSLER

SEQ ID NO: 2391 - protein, 239 aa, Artificial Sequence
  Synthetic Polypeptide
DIQMTQSPSSLSASVGDRVTINCKASQDINSYLSWFQQKPGKAPKTLIYRANRLVDGVPSRFSGSGSGQDYTLTISSLQPEDFATYYCLQYDEFPLTFGGGTKVEIKGGGGSGGGGSGGGGSQVQLVQSGAEVKKPGASVKVSCKASGYTFTNYDINWVRQAPGQGLEWIGWIYPGDGSTKYNEKFKAKATLTADTSTSTAYMELRSLRSDDTAVYYCASGYEDAMDYWGQGTTVTVSS

SEQ ID NO: 2392 - protein, 244 aa, Artificial Sequence
  Synthetic Polypeptide
EIVLTQSPLSLPVTPGEPASISCRSSQSLLHSNGYNYLDWYLQKPGQSPQLLIYLGVNSVSGVPDRFSGSGSGTDFTLKISRVEAEDVGVYYCMQALQTPWTFGQGTKVEIKGGGGSGGGGSGGGGSQVQLVQSGAEVKKPGSSVKVSCKASGGIFSNHAISWVRQAPGQGLEWMGGIIPIFGTANYAQKFQGRVTITADESTSTAFMELSSLRSEDTAVYYCAREWADVFDIWGQGTMVTVSS

SEQ ID NO: 2393 - protein, 243 aa, Artificial Sequence
  Synthetic Polypeptide
DIQMTQSPASLTVSLGQRATISCRASESVDSYGNSYLHWYQQKPGQPPQLLIYLASNLESGVPARFSGSGSRTDFTLTIDPVEADDAATYYCQQNNEDPWTFGGGTKVEIKGGGGSGGGGSGGGGSEVQLQQSGAELVKPGASVKMSCKAFGYTFTTFPIEWMKQSHGKSLEWIGNFHPYNDQTKYNEEFKGRAKLTIDRSSSTVYLELGRLTSDDSAVYYCARGYYYAFDFWGQGTTLTVSS

SEQ ID NO: 2394 - protein, 240 aa, Artificial Sequence
  Synthetic Polypeptide
DIQMTQSPSSLSASVGDRVTITCRASQGIRNDLGWYQQKPGKAPKRLIYAASSLQSGVPSRFSGSGSGTEFTLTISSLQPEDFATYYCLQHNSYPWTFGQGTKLEIKGGGGSGGGGSGGGGSEVQLVESGGALIQPGGSLRLSCVASGFTISGNYMSWVRQAPGKGLEWVSLIYSGDSTYYADSVKGRFTISRDISKNTVYLQMNSLRVEDTAVYYCVRDGYYVSDMVVWGKGTTVTVSS

SEQ ID NO: 2395 - protein, 250 aa, Artificial Sequence
  Synthetic Polypeptide
DVLLTQSPLSLPVTLGQPASISCRSSQTIVHSNGNTYLEWFQQRPGQSPRLLIYQVSNRFSGVPDRFSGSGSGTDFTLKISRVEAEDVGVYYCFQGSHVPRTFGGGTKVEIKRGGGGSGGGGSGGGGSQIQLVQSGSELKKPGASVKVSCKASGYTFTNYGMNWVRQAPGQGLKWMGWINTNTGEPKYAEEFKGRFALSLDTSVSTAYLQINSLKAEDTAVYFCARGYGNYARGAWLAYWGQGTLVTVSS

SEQ ID NO: 2396 - protein, 236 aa, Artificial Sequence
  Synthetic Polypeptide
EIVLTQSPATLSLSPGERATLSCSASSSINYIYWLQQKPGQAPRILIYLTSNLASGVPARFSGSGSGTDFTLTISSLEPEDFAVYYCLQWSSNPLTFGGGTKVEIKGGGGSGGGGSGGGGSFEVQLVESGGGLVKPGGSLRLSCAASGFTFSSYDMSWVRQAPGKGLEWVSTISSGGSYTYYLDSIKGRFTISRDNAKNSLYLQMNSLRAEDTAVYYCARQGLDYWGRGTLVTVSS

SEQ ID NO: 2397 - protein, 245 aa, Artificial Sequence
  Synthetic Polypeptide
DIVMTQSPDSLAVSLGERATINCRASKSVSTSGYSFMHWYQQKPGQPPKLLIYLASNLESGVPDRFSGSGSGTDFTLTISSLQAEDVAVYYCQHSREVPWTFGQGTKVEIKRGGGGSGGGGSGGGGSQVQLVQSGAEVKKPGASVKVSCKASGYTFTNYGMNWVRQAPGQGLEWMGWINTYTGEPTYADAFKGRFAFSLDTSTSTAYLQINSLRSDDTAVYYCARDYGDYGMDYWGQGTTVTVSS

SEQ ID NO: 2398 - protein, 241 aa, Artificial Sequence
  Synthetic Polypeptide
DIVMTQTPLTLSVTIGQPASISCKSSQSLLDSDGKTYLNWLLQRPGQSPERLIYLVSKLDSGVPDRFTGSGSGTDFTLKISRVEAEDLGVYCCWQGTHFPYTFGGGTKVEIKGGGGGSGGGGSGGGGSQVQLQQPGAELVRPGASVKLSCKASGYTFTSYWMNWVKQRPGQGLEWIGMIDPSDSETHYNHIFKDKATLTVDKSSSTAYLQLSSLTSEDSAVYYCARNLYLWGQGTSVTVSS

SEQ ID NO: 2399 - protein, 241 aa, Artificial Sequence
  Synthetic Polypeptide
DIVMTQTPLSLSVTPGQPASISCKSSQSLLDGDGKTYLNWLLQKPGQSPQRLIYLVSKLDSGVPDRFSGSGSGTDFTLKISRVEAEDVGVYYCWQGTHFPRTFGQGTKLEIKGGGGSGGGGSGGGGSQVQLVQSGAEVKKPGASVKVSCKASGYTFKDTYIHWVRQAPGQGLEWMGRIDPANGNTKYDPKFQGRVTMTRDTSISTAYMELSRLRSDDTAVYYCARRGGVDWGQGTLVTVSS

SEQ ID NO: 2400 - protein, 249 aa, Artificial Sequence
  Synthetic Polypeptide
DIVMTQSPDSLAVSLGERATINCESSQSLLNSGNQKNYLTWYQQKPGQPPKPLIYWASTRESGVPDRFSGSGSGTDFTLTISSLQAEDVAVYYCQNDYSYPYTFGQGTKLEIKRGGGGSGGGGSGGGGSEVQLVQSGAEVKKPGESLKISCKGSGYSFTDYYMKWARQMPGKGLEWMGDIIPSNGATFYNQKFKGQVTISADKSISTTYLQWSSLKASDTAMYYCARSHLLRASWFAYWGQGTMVTVSS

SEQ ID NO: 2401 - protein, 244 aa, Artificial Sequence
  Synthetic Polypeptide
DIVLTQSPASLAVSLGQRATISCRASESVDNYGNTFMHWYQQKPGQPPKLLIYRASNLESGIPARFSGSGSRTDFTLTINPVEADDVATYYCQQSNEDPPTFGAGTKLELKGGGGSGGGGSGGGGSQIQLVQSGPELKKPGETVKISCKASGYIFTNYGMNWVKQAPGKSFKWMGWINTYTGESTYSADFKGRFAFSLETSASTAYLHINDLKNEDTATYFCARSGGYDPMDYWGQGTSVTVSS

SEQ ID NO: 2402 - protein, 248 aa, Artificial Sequence
  Synthetic Polypeptide
DFVMTQSPDSLAVSLGERVTMSCKSSQSLLNSGNQKNYLTWYQQKPGQPPKLLIYWASTRESGVPDRFSGSGSGTDFTLTISSLQAEDVAVYYCQNDYSYPYTFGQGTKLEIKGGGGSGGGGSGGGGSEVQLVQSGAELKKPGASVKVSCKASGYTFTDYYMKWVRQAPGQGLEWIGDIIPSNGATFYNQKFKGRVTITVDKSTSTAYMELSSLRSEDTAVYYCARSHLLRASWFAYWGQGTLVTVSS

SEQ ID NO: 2403 - protein, 248 aa, Artificial Sequence
  Synthetic Polypeptide
DFVMTQSPDSLAVSLGERVTMSCKSSQSLLNSGNQKNYLTWYQQKPGQPPKLLIYWASTRESGVPDRFSGSGSGTDFTLTISSLQAEDVAVYYCQNDYSYPYTFGQGTKLEIKGGGGSGGGGSGGGGSQVQLVQSGAELKKPGASVKVSCKASGYTFTDYYMKWVRQAPGQGLEWIGDIIPSNGATFYNQKFKGRVTITVDKSTSTAYMELSSLRSEDTAVYYCARSHLLRASWFAYWGQGTLVTVSS

SEQ ID NO: 2404 - protein, 242 aa, Artificial Sequence
  Synthetic Polypeptide
EIVLTQSPGTLSLSPGERATLSCRASQSVSSSYLAWYQQKPGQAPRLLIYGASSRATGIPDRFSGSGSGTDFTLTISRLEPEDFAVYYCQQDYGFPWTFGQGTKVEIKRGGGGSGGGGSGGGGSEVQLVQSGAEVKKPGESLKISCKGSGYSFTSYWISWVRQMPGKGLEWMGIIDPSDSDTRYSPSFQGQVTISADKSISTAYLQWSSLKASDTAMYYCARGDGSTDLDYWGQGTLVTVSS

SEQ ID NO: 2405 - protein, 244 aa, Artificial Sequence
  Synthetic Polypeptide
QFVLTQPPSVSTNPGSTVKLSCKRNTGNIGSNYVNWYQQKPGQSPTTMIYRDDKRPDGVPDRFSGSIDRSSNSALLTINNVQTEDEADYFCQSYSSGINIIFGGGTKLTVLGGGGSGGGGSGGGGSQVQLQESGPGLVKPSETLSLTCTVSGFSLTTYDVHWVRQPPGKGLEWMGRIQNAGITDYNSALKSRLIISRDTSKSQVFLKMNSVTTADTAMYFCAKTGSYFYAFDHWGQGTLVTVSS

SEQ ID NO: 2406 - protein, 241 aa, Artificial Sequence
  Synthetic Polypeptide
DIQMTQSPASLSASLGETVTIECRPSEDIHSNVAWYQQKPGNSPQLLIYDASNLADGVPSRFSGSGSGTQYSLKINSLQSEDVASYFCHQYNIYPYTFGSGTKLELKGGGGSGGGGSGGGGSQVQLQESGPTLVKPGDSVKMSCKASGYTFTDYIIHWVKQSHGKSLEWIGYINPYSDGTNYNEKFKSKATLTVDKSTSTAYMEFSRLTSEDSAIYFCALNYGSYYAMDAWGQGTSVTVSS

SEQ ID NO: 2407 - protein, 242 aa, Artificial Sequence
  Synthetic Polypeptide
EIVLTQSPATLSLSPGERATLSCRASQSVSSYLAWYQQKPGQAPRLLIYDASNRATGIPARFSGSGSGTDFTLTISSLEPEDFAVYYCQQRSNWPLTFGQGTKVEIKRGGGGSGGGGSGGGGSEVQLLESGGGLVQPGGSLRLSCAASGFTFSGYWMHWVRQAPGKGLEWVSAIRSDGSSKYYADSVKGRFTISRDNSKNTLYLQMNSLRAEDTAVYYCAKDGVIEDTFDYWGQGTLVTVSS

SEQ ID NO: 2408 - protein, 238 aa, Artificial Sequence
  Synthetic Polypeptide
DVQITQSPSYLAASPGETITINCRASKSISKDLAWYQEKPGKTNKLLIYSGSTLQSGIPSRFSGSGSGTDFTLTISSLEPEDFAMYYCQQHNKYPYTFGGGTKLEIKRGGGGSGGGGSGGGGSQVQLQQPGAELVRPGASVKLSCKASGYTFTSYWMNWVKQRPDQGLEWIGRIDPYDSETHYNQKFKDKAILTVDKSSSTAYMQLSSLTSEDSAVYYCARGNWDDYWGQGTTLTVSS

SEQ ID NO: 2409 - protein, 269 aa, Artificial Sequence
  Synthetic Polypeptide
YINIYNAEPANPSEKNSPTQYAYGSGEFDIQMTQSPASLSASLGETVTIECRTSKDIYSNLAWFQQEPGNSPQLLIYDASNLADGVPSRFSGSGSGTQYSLQINNLQSEDVASYFCHQYNNYPYTFGTGTKLELKGGGGSGGGGSGGGGSQVQLQESGPTLVNPGDSVKMSCKASGYTFTDHIIHWVKQSHGKSLEWIGYINPYSGGANYNGKFKSKATLTIDKSSSTAYMEFSRLTSGDSAIYYCALNYGSYYAMDAWGQGTSVTVSS

SEQ ID NO: 2410 - protein, 240 aa, Artificial Sequence
  Synthetic Polypeptide
EIVLTQSPTSMTASPGEQVTITCRASSSINYMHWYQQKPGASPRPWIYETSKLASGVPDRFSGSASGTSYSLTINNMEAEDAATYYCQQWNYPSWTFGGGTKLELKGGGGSGGGGSGGGGSEVQLVESGGGLVQPGRSLKLSCAASGFTFSDYNMAWVRQAPKKGLEWVATILYDGGRTYYRGSVKGRFTISRDNAKSTLYLRMDSLRSEDTATYYCATHSRGTDYFDYWGQGVMVTVSS

SEQ ID NO: 2411 - protein, 249 aa, Artificial Sequence
  Synthetic Polypeptide
DIVMTQSPSSLAVSEGETVTINCKSSQSFLSSGDGKNYVAWYQYKPGQSPKLLIYWASTRQSGVPDRFIGSGSGTDFTLTISTVQAEDLAIYYCQQYYDTPLTFGSGTKLEIKGGGGSGGGGSGGGGSEVKLQESGPSLVQSSQTLSLTCTVSGFSLTSYHIHWVRQTPGKGLEWMGVMWSDGDTSYNSALKSRLSISRDTSQSQVFLKMNSLQTEDTATYYCARGYYSSYLYLWFAYWGQGTLVTVSS

SEQ ID NO: 2412 - protein, 253 aa, Artificial Sequence
  Synthetic Polypeptide
DVLMTQTPVSLPVSLGGQVSISCRSSQSLVHSDGDTYLHWYLQKPGQSPQLLIYRVSNRFSGVPDRFSGSGSGTDFTLKISRVEPEDLGLYYCLQTTHFPPWTFGGGTKLEMKGGGGSGGGGSGGGGSQVQLQQSGPELRRPGSSVRLSCKASGYRIKDFLIHWIKNRPEHGLEWIGWIDPEDGETKYAQKFQTKATLTADTSSNTAYMQLSSLTSEDTATYFCARWGDVYYGLMRGHVMDAWGQGTSVTVSS

SEQ ID NO: 2413 - protein, 244 aa, Artificial Sequence
  Synthetic Polypeptide
DIQMTQSTSSLSASLGDRVTISCSASQGINNYLNWYQQKPDGTVELLIYYTSTLQSGVPSRFSGSGSGTDYSLTISNLEPEDIGTYYCQQYSKLPRTFGGGTKLEIKGGGGSGGGGSGGGGSQVQLQQSGSELMMPGASVKISCKATGYTFSNYWIEWVKQRPGHGLEWIGEILPGTGRTIYNEKFKGKATFTADISSNTVQMQLSSLTSEDSAVYYCARRDYYGNFYYAMDYWGQGTSVTVSS

SEQ ID NO: 2414 - protein, 239 aa, Artificial Sequence
  Synthetic Polypeptide
DIQMTQSPASLSVSVGETVTITCRASENIYSNLAWYQQKQGKSPQLLVYAATNLADGVPSRFSGSGSGTQYSLKINSLQSEDFGSYYCQHFWGTWTFGGGTTLEIKGGGGSGGGGSGGGGSEVQLQQSGPELVKPGASVKMSCKASGYTFTDYYMKWMKQSHGKSLEWIGDINPNNGGTTYNQKFKGKATLTVDKSSSTAYMQLNSLTSEDSAVYYCARDYGYGYFDYWGQGTTLTVSS

SEQ ID NO: 2415 - protein, 242 aa, Artificial Sequence
  Synthetic Polypeptide
EIVLTQSPGTLSLSPGERATLSCRASQSVGGYLAWYQQKPGQAPRLLIYDASNRATGIPARFSGSGSGTDFTLTISSLEPEDFAVYYCQQRNNWPPMYTFGQGTKLEIKRGGGGSGGGGSGGGGSQVQLVQSGAEVKKPGSSVKVSCKASGGTFSSYAISWVRQAPGQGLEWMGGIIPILGTANYAQKFQGRVTITADESTSTAYMELSSLRSEDTAVYYCARWGGGAFDIWGQGTMVTVSS

SEQ ID NO: 2416 - protein, 237 aa, Artificial Sequence
  Synthetic Polypeptide
QIVLTQSPALMSASPGEKVTMTCSASSSVRYMYWYQQKPRSSPKPWIHLTSNLASGVPARFSGSGSGTSYSLTISSMEAEDAATYYCQQWSSHPFTFGSGTKLEIKGGGGSGGGGSGGGGSDVQLQESGPGLVKPSQSLSLTCTVTGFSITSDYSWNWIRQFPGNKLEWMGYISYSGHTSYNPSLESRISITRDTSKNQFFLQLNSVTTEDTATYYCTRGNWDVVYWGQGTLVTVSA

SEQ ID NO: 2417 - protein, 247 aa, Artificial Sequence
  Synthetic Polypeptide
DVVMTQSPLSLPVTLGQPASISCRSSQSIVHSDGNTYLEWYQQRPGQSPRRLIYKVSNRFSGVPDRFSGSGSGTDFTLKISRVEAEDVGVYYCFQGSHAPWTFGGGTKVEIKGGGGSGGGGSGGGGSEVQLVESGGGLVQPGGSLRLSCAASGFTFSSYGMHWVRQAPGKGLEWVAYITTRSSTIYYADSVKGRFTISRDNAKNSLYLQMNSLRAEDTAVYYCTREPLTGYYAMDYWGQGTSVTVSS

SEQ ID NO: 2418 - protein, 239 aa, Artificial Sequence
  Synthetic Polypeptide
DIQMTQSPSSLSASVGDRVTITCRASQSISLWLNWYQQKPGKAPKLLIYAASTLQSGVPSRFSGSGSGTDFTLTISSLQPEDFATYYCQQYYTSPYTFGQGTKVEIKRGGGGSGGGGSGGGGSQVQLLESGGGLVQPGGSLRLSCAASGFTFSSYAMSWVRQAPGKGLEWVSVIRSSGSSTYYADSVKGRFTISRDNSKNTLYLQMNSLRAEDTAVYYCARGGGYFDYWGQGTLVTVSS

SEQ ID NO: 2419 - protein, 242 aa, Artificial Sequence
  Synthetic Polypeptide
DIQMTQSPSSLSASVGDRVTITCRASQSISSYLNWYQQKPGKAPKLLIYAVSTLQSGVPSRFSGSGSGTDFTLTISSLQPEDFATYYCQQSGTFPPTTFGQGTKVEIKRGGGGSGGGGSGGGGSQVQLLESGGGLVQPGGSLRLSCAASGFTFSSHGMHWVRQAPGKGLEWVSVISGSGSNTGYADSVKGRFTISRDNSKNTLYLQMNSLRAEDTAVYYCARQWGSYAFDSWGQGTLVTVSS

SEQ ID NO: 2420 - protein, 252 aa, Artificial Sequence
  Synthetic Polypeptide
DIVMSQSPSSLAVSVGEKVTMSCKSSQSLLHSSNQKNYLAWYQQKPGQSPKVLIYWASTRESGVPDRFTGSGSGTDFTLTITSVKSEDLAVYYCQQYYSYPWTFGGGTRLEIKRGGGGSGGGGSGGGGSEVQLQQSVAELVKPGASVKMSCKVSGYTLTDHTIHWMKQRPEQGLEWIGYIYPRDGITGYNEKFKGKATLTADTSSSTAYMQLNSLTSEDSAVYFCARWGYSYRNYAYYYDYWGQGTTLTVSS

SEQ ID NO: 2421 - protein, 249 aa, Artificial Sequence
  Synthetic Polypeptide
EIVLTQSPGTLSLSPGERATLSCRASQSVSSSYLAWYQQKPGQAPRLLIYGTSSRATGIPDRFSGSGSGTDFTLTISRLEPEDFAVYYCQQYGSSPFTFGGGTKVEIKRGGGGSGGGGSGGGGSQVQLQESGPGLAKPSETLSLTCTVSGDSITSYYWSWIRQPPGKGLEWIGYIYYSGSTNYNPSLKSRVTISVDTSKNQFSLKLSSVTAADTAVYYCARDQRRIAAAGTHFYGMDVWGQGTTVTVSS

SEQ ID NO: 2422 - protein, 241 aa, Artificial Sequence
  Synthetic Polypeptide
DILLTQSPVILSVSPGERVSFSCRASQSIGTNIHWYQQRTNGSPRLLIKYASESISGIPSRFSGSGSGTDFTLSINSVESEDIADYYCQQNNNWPTTFGAGTKLELKGGGGSGGGGSGGGGSQVQLKQSGPGLVQPSQSLSITCTVSGFSLTNYGVHWVRQSPGKGLEWLGVIWSGGNTDYNTPFTSRLSINKDNSKSQVFFKMNSLQSNDTAIYYCARALTYYDYEFAYWGQGTLVTVSA

SEQ ID NO: 2423 - protein, 234 aa, Artificial Sequence
  Synthetic Polypeptide
MTQSPKFLLVSAGDRVTLTCKASQSVNNDVYWYQQEPGQSPKLLIYWASTRESGVPDRFTGSGSGTDFTLTISSVQAEDLAVYYCKQSYNLYTFGGGTKLEIKRGGGGSGGGGSGGGGSESGRGLVQPGGSRKLSCAASGFTFSTSGMHWVRQAPEKGLEWVAYISSGSTTIYHADTVKGRFTISRDNPKNTLFLQMTSLRSEDTAMYYCCARSGQFGNYFDYWGQGTTLTVSS

SEQ ID NO: 2424 - protein, 239 aa, Artificial Sequence
  Synthetic Polypeptide
QSPSSLAVSAGEKVTMSCKSSQSLLNSRTRKNYLAWYQQKPGQSPKLLIYWASTRESGVPDRFTGSGSGTDFTLTISSVQAEDLAVYYCKQSNLYTFGGGTKLEIKGGGGSGGGGSGGGGSQVQLEESGPELVKPGASVKLSCKASGYTFTEYIIHWVKQRSGQGLEWIGWFYPGSGSIKYNEKFKDKATLTADKSSSTVYMELSGLTSEDSAVYFCARHDGYSYFDYWGQGTTLTVSS

SEQ ID NO: 2425 - protein, 242 aa, Artificial Sequence
  Synthetic Polypeptide
DIQMTQSPSSLSASLGERVSLTCRATQELSGYLSWLQQKPDGTIKRLIYAASTLDSGVPKRFSGNRSGSDYSLTISSLESEDFADYYCLQYAIYPYTFGGGTKLEIKGGGGSGGGGSGGGGSEVQLQQSGPELVKPGASVKMSCKASGYTFTSYFIHWVKQKPGQGLEWIGFINPYNDGSKYNEKFKGKATLTSDKSSSTAYMELSSLTSEDSAVYYCTRDDGYYGYAMDYWGQGTSVTVSS

SEQ ID NO: 2426 - protein, 247 aa, Artificial Sequence
  Synthetic Polypeptide
DTIVLTQSPASLAVSLGQRATISCRASESVDSYGNSFMHWYQQKPGQPPKLLIYLASNLESGVPARFSGSGSRTDFTLTIDPVEADDAATYYCQQNNYDPWTFGGGTKLEIKGGGGSGGGGSGGGGSEVQLQQSGPELVKPGASVKMSCKASGYTFTSYVMHWVKQKPGQGLEWIGYINPYNDGTKYNEKFKGKATLTSDTSSSTAYMELNSLTSEDSAVYFCARPIYFDNDYFDYWGQGTTLKVSS

SEQ ID NO: 2427 - protein, 242 aa, Artificial Sequence
  Synthetic Polypeptide
DIQMTQSPSSLSASVGDRVTITCKASQDVSTAVAWFQQKPGKAPKLLIYSPSYRYTGVPSRFSGSGSGTDFTLTISSLQPEDFTYYCQQLYSTPYTFGQGTKVEIKGGGGSGGGGSGGGGSEVQLVQSGAEVKKPGASVKVSCKASGYTFTDYYLDVVVRQAPGQGLEWIGRVNPYNGGTIYNQKFKGRVTLTRDTSTSTAYLELSSLRSEDTAVYYCARDHYRYDPLLDYWGQGTLVTVSS

SEQ ID NO: 2428 - protein, 248 aa, Artificial Sequence
  Synthetic Polypeptide
DIQMTQSPSSLSASVGDRVTITCRASQSVSTSSYNYMHWYQQKPGKPPKLLIKYASNLESGVPSRFSGSGSGTDFTLTISSLQPEDFATYYCQHSWEIPLTFGQGTKVEIKGGGGSGGGGSGGGGSEVQLVQSGAEVKKPGASVKVSCKASGYSFTDYYMHWVRQAPGQGLEWIGRINPYNGAAFYSQNFKDRVTLTVDTSTSTAYLELSSLRSEDTAVYYCAIERGADLEGYAMDYWGQGTLVTVSS

SEQ ID NO: 2429 - protein, 246 aa, Artificial Sequence
  Synthetic Polypeptide
EIVLTQSPATLSASPGERVTLTCRASSNVISSYVHWYQQKPGSSPRLFLYSTSNLASGVPSRFSGSGSGTDFTFTISSLEAEDAATYYCQQYSGYPLTFGQGTRLEIKGGGGSGGGGSGGGGSQVQLQESGPGLVKPSETLSLTCAVSGYSITSAYYWNWIRQPPGKGLEWIGYISYDGRNNYNPSLKNRITINPDTSKNQFSLQLNSVTPEDTAVYYCAREGDYDVGNYYAMDYWGQGTLVTVSS

SEQ ID NO: 2430 - protein, 246 aa, Artificial Sequence
  Synthetic Polypeptide
EIVLTQSPATLSLSPGERATLSCRASSNVISSYVHWYQQKPGQAPRLLIYSTSNLASGIPARFSGSGSGTDFTLTISSLEPEDFAVYYCQQYSGYPLTFGQGTRLEIKGGGGSGGGGSGGGGSEVQLVESGGGLVQPGRSLRLSCAASGYSITSAYYWNWVRQAPGKGLEWVSYISYDGRNNYNPSLKNRFTISRDNAKKSLYLQMNSLRAEDTALYYCAKEGDYDVGNYYAMDYWGQGTTVTVSS

SEQ ID NO: 2431 - protein, 258 aa, Artificial Sequence
  Synthetic Polypeptide
DLNFMLTQPHSVSGSPGKTVTISCTRSTGSITSNYVHWYQQRPGSSPTTVICEDNERPSGVPDRFSGSIDISSNSASLTISGLKTEDEADYYCQSYDDSNHISVFGTGTKVTVLGQPKANPGGGGSGGGGSGGGGSQVQLQESGPGLVKPSETLSLTCTVSGGSISSSNYYWGWIRQPPGKGLEWIGAIYYSGSTYYNPSLKSRVAISVDTSKNQFSLKLSSVTAADTAVYYCARRIGVAGQWYFDLWGRGTLVTVSS

SEQ ID NO: 2432 - protein, 244 aa, Artificial Sequence
  Synthetic Polypeptide
DIQMTQSPSSLSASVGDRVTITCKASQDVGIAVAWYQQKPGKVPKLLIYWASTRHTGVPDRFSGSGSGTDFTLTISSLQPEDVATYYCQQYSSYPYTFGQGTKVEIKGGGGSGGGGSGGGGSQIQLVQSGPDLKKPGETVKISCKASGYTFTNTGMNWVKQAPGKGLKWMGWINTYTGEPTYADDFKGRFTFSLETSASTAYLQINNLKNEDTATYFCTRWGYGSSLYYAMDYWGQGTSVTVSS

SEQ ID NO: 2433 - protein, 241 aa, Artificial Sequence
  Synthetic Polypeptide
DIQMTQSPSSLSASVGDRVTITCKASQDVGIAVAWYQQKPGKVPKLLIYWASTRHTGVPDRFSGSGSGTDFTLTISSLQPEDVATYYCQQYSSYPYTFGQGTKVEIKGGGGSGGGGSGGGGSEVQLVESGGGLVQPGGSLRLSCAASGFDFSRYWMSWVRQAPGKGLEWIGEINPDSSTINYAPSLKDKFIISRDNAKNSLYLQMNSLRAEDTAVYYCARPDGNYWYFDVWGQGTLVTVSS

SEQ ID NO: 2434 - protein, 242 aa, Artificial Sequence
  Synthetic Polypeptide
DIVMTQSQKSMSTSVGDRVSITCKASQDVITGVAWYQQKPGQSPKLLIYSASYRYTGVPDRFTGSGSGTDFTFTISNVQAEDLAVYYCQQHYSTPLTFGAGTKLELKGGGGSGGGGSGGGGSQVQLQQPGAELVRPGASVKLSCKASGYSFTTYWMNWVKQRPGQGLEWIGMIHPSDSETRLNQKFKDKATLTVDKSSSTAYMQLSSPTSEDSAVYYCARSTMIATRAMDYWGQGTSVTVSS

SEQ ID NO: 2435 - protein, 244 aa, Artificial Sequence
  Synthetic Polypeptide
DIQMTQSPSSLSASVGDRVTITCKASQDVSTAVAWYQQKPGKAPKLLIYSASYRYTGVPDRFTGSGSGTDFTLTISSLQPEDFATYYCQQHYSTPPYTFGGGTKVEIKRGGGGSGGGGSGGGGSQVQLVQSGAEVKKPGASVKVSCKASGYAFSSSWMNWVRQAPGQGLEWIGRIYPGDGDTKYNGKFKGKATLTADKSTSTAYMELSSLRSEDTAVYYCARSTMIATGAMDYWGQGTLVTVSS

SEQ ID NO: 2436 - protein, 245 aa, Artificial Sequence
  Synthetic Polypeptide
DVVMTQTPLSLSVTPGQPASISCRSSQSLVHNNGNTYLHWYLQKPGQSPQLLIYKVSNRFSGVPDRFSGSGSGTDFTLKISRVEAEDVGVYFCSQSTHVPPYTFGGGTKVEIKGGGGSGGGGSGGGGSEVQLVESGGGLVQPGGSLRLSCAASGFTFSDYYMAWVRQAPGKGLEWVAEINYDGSSTYYVDSVKGRFTISRDNAKNSLYLQMNSLRAEDTAVYYCARDRGFYFDYWGQGTTVTVSS

SEQ ID NO: 2437 - protein, 245 aa, Artificial Sequence
  Synthetic Polypeptide
DVVMTQTPLSLSVTPGQPASISCRSSQSLVHSNGLTYLHWYLQKPGQSPQLLIYKVSNRFSGVPDRFSGSGSGTDFTLKISRVEAEDVGVYFCSQSTHVPPFTFGGGTKVEIKGGGGSGGGGSGGGGSEVQLVESGGGLVQPGGSLRLSCAASGFTFSDYYMAWVRQAPGKGLEWVASINYDGESTYYVDSVKGRFTISRDNAKNSLYLQMNSLRAEDTAVYYCARDRGYYFDYWGQGTTVTVSS

SEQ ID NO: 2438 - protein, 245 aa, Artificial Sequence
  Synthetic Polypeptide
DVVMTQSPLSLPVTPGEPASISCRSSQSLVHSNGNTYLHWYLQKPGQSPQLLIYKVSNRFSGVPDRFSGSGSGTDFTLKISRVEAEDVGVYFCSQSTHVPPFTFGGGTKVEIKGGGGSGGGGSGGGGSEVQLVESGGGLVQPGGSLRLSCAASGFTFSDYYMAWVRQAPGKGLEWVADINYDGGSTYYLDSLKSRFTISRDNAKNSLYLQMNSLRAEDTAVYYCARDRGYYFDYWGQGTLVTVSS

SEQ ID NO: 2439 - protein, 243 aa, Artificial Sequence
  Synthetic Polypeptide
DIQMTQSSSYLSVSLGGRVTITCKASDHINNWLAWYQQKPGNAPRLLISGATSLETGVPSRFSGSGSGKDYTLSITSLQTEDVATYYCQQYWSTPWTFGGGTKLEIKGGGGSGGGGSGGGGSQVQLQQSGAELARPGASVKLSCKASGYTFTSYWMQWVKQRPGQGLEWIGAIYPGDGDTRYTQKFKGKATLTADKSSSTAYMQLSSLASEDSAVYYCARGKVYYGSNPFAYWGQGTLVTVSA

SEQ ID NO: 2440 - protein, 243 aa, Artificial Sequence
  Synthetic Polypeptide
DIVMTQSHKFMSTSVGDRVSITCKASQDVSTAVAWYQQKPGQSPKLLIYSASYRYTGVPDRFTGSGSGTDFTFTISSVQAEDLAVYYCQQHYSTPPYTFGGGTKLEIKGGGGSGGGGSGGGGSQVQLQQSGPELVKPGASVKISCKASGYAFSSSWMNWVKQRPGQGLEWIGRIYPGDGDTKYNGKFKGKATLTADKSSSTAYMQLSSLTSVDSAVYFCARSTMIATGAMDYWGQGTSVTVSS

SEQ ID NO: 2441 - protein, 248 aa, Artificial Sequence
  Synthetic Polypeptide
QSVLTQPPSVSGAPGQRVTISCTGSGSNIGAPYDVSWYQQLPGTAPKLLIYHNNKRPSGVPDRFSGSKSGTSASLAITGLQAEDEADYYCATVEAGLSGSVFGGGTKLTVLGAGGGGSGGGGSGGGGSQVQLVQSGAEVKKPGASVKVSCKVSGYTLTELSIHWVRQAPGKGLEWMGGFDPEENEIVYAQRFQGRVTMTEDTSTDTAYMELSSLRSEDTAVYYCAIVGSFSPLTLGLWGQGTMVTVSS

SEQ ID NO: 2442 - protein, 248 aa, Artificial Sequence
  Synthetic Polypeptide
QSVLTQPPSVSGAPGQRVTISCTGSGSNIGAPYDVSWYQQLPGTAPKLLIYHNNKRPSGVPDRFSGSKSGTSASLAITGLQAEDEADYYCQSYDSSSISTIFGGGTKLTVLGAGGGGSGGGGSGGGGSQVQLVQSGAEVKKPGASVKVSCKVSGYTLTELSIHWVRQAPGKGLEWMGGFDPEENEIVYAQRFQGRVTMTEDTSTDTAYMELSSLRSEDTAVYYCAIVGSFSGIAYRPWGQGTMVTVSS

SEQ ID NO: 2443 - protein, 246 aa, Artificial Sequence
  Synthetic Polypeptide
DIQMTQSPSSLSASVGDRVTITCSASSSVSYMYWYQQKPGKAPKLLIYLTSNLASGVPSRFSGSGSGTDFTLTISSLQPEDFATYYCQQWRSNPFTFGQGTKLEIKRGGGGSGGGGSGGGGSQITLKESGPTLVKPTQTLTLTCTFSGFSLSTSGMGVGWIRQPPGKALEWLAHIWWDDVKRYSPSLKSRLTITKDTSKNQVVLTMTNMDPVDTATYYCARIVSFDNDVVSAMDYWGQGTLVTVSS

SEQ ID NO: 2444 - protein, 241 aa, Artificial Sequence
  Synthetic Polypeptide
EIVMTQSPATLSVSPGERATLSCKASQSVSNDVVWYQQKPGQAPRLLIYYASNRYTGIPARFSGSGSGTEFTLTISSLQSEDFAVYYCQQDYTSPWTFGQGTKLEIKRGGGGSGGGGSGGGGSQVQLVQSGAEVKKPGASVKVSCKASGYTFTNYGMNWVRQAPGQGLEWMGWINTYTGEPTYADDFKGRVTMTTDTSTSTAYMELRSLRSDDTAVYYCARIGDSSPSDYWGQGTLVTVSS

SEQ ID NO: 2445 - protein, 241 aa, Artificial Sequence
  Synthetic Polypeptide
STDIQMTQSPSSLSASVGDRVTITCRASQSISSYLNWYQQKPGKAPKLLIYLASNLQSGVPSRFSGSGSGTDFTLTISSLQPEDFATYYCQQAEYMPLTFGQGTKVEIKRAGGGGSGGGGSGGGGSEVQLLESGGGLVQPGGSLRLSCAASGFTFSGYAMSWVRQAPGKGLEWVSEIAPPGLNTRYADSVKGRFTISRDNSKNTLYLQMNSLRAEDTAVYYCAKSDTAFDYWGQGTLVTVS

SEQ ID NO: 2446 - protein, 245 aa, Artificial Sequence
  Synthetic Polypeptide
DQAVLTQESALTTSPGETVTLTCRSSTGAVTTSNYANWVQEKPDHLFTGLIGGTNNRVPGVPARFSGSLIGDKAALTITGAQTEDEAIYFCVLWHSNHWVFGGGTKLTVLGGGGSGGGGSGGGGSDVQLVESGGGLVQPGGSRKLSCAASGFTFSSFGMHWVRQAPEKGLEWVAYISSGSSTLHYADTVKGRFTISRDNPKNTLFLQMTSLRSEDTAMYYCARWGNYPHYAMDYWGQGTSVTVSS

SEQ ID NO: 2447 - protein, 236 aa, Artificial Sequence
  Synthetic Polypeptide
DIQMTQSPSSLSASVGDRVTITCRASQGIRNNLAWYQQKPGKAPKRLIYAASNLQSGVPSRFTGSGSGTEFTLIVSSLQPEDFATYYCLQHHSYPLTSGGGTKVEGGGGSGGGGSGGGGSEVQVLESGGGLVQPGGSLRLSCAASGFTFSSYAMSWVRQAPGKGLEWVSAISGSGGSTNYADSVKGRFTISRDNSKNTLYLQMNSLRAEDTAVYYCAGSSGWSEYWGQGTLVTVSS

SEQ ID NO: 2448 - protein, 241 aa, Artificial Sequence
  Synthetic Polypeptide
EIQLVQSGAEVKKPGESLRISCKGSGFNIEDYYIHWVRQMPGKGLEWMGRIDPENDETKYGPIFQGHVTISADTSINTVYLQWSSLKASDTAMYYCAFRGGVYWGQGTTVTVSSGGGGSGGGGSGGGGSDVVMTQSPDSLAVSLGERATINCKSSQSLLDSDGKTYLNWLQQKPGQPPKRLISLVSKLDSGVPDRFSGSGSGTDFTLTISSLQAEDVAVYYCWQGTHFPGTFGGGTKVEIK

SEQ ID NO: 2449 - protein, 248 aa, Artificial Sequence
  Synthetic Polypeptide
ELVMTQSPSSLTVTAGEKVTMSCKSSQSLLNSGNQKNYLTWYQQKPGQPPKLLIYWASTRESGVPDRFTGSGSGTDFTLTISSVQAEDLAVYYCQNDYSYPLTFGAGTKLEIKGGGGSGGGGSGGGGSEVQLLEQSGAELVRPGTSVKISCKASGYAFTNYWLGWVKQRPGHGLEWIGDIFPGSGNIHYNEKFKGKATLTADKSSSTAYMQLSSLTFEDSAVYFCARLRNWDEPMDYWGQGTTVTVSS

SEQ ID NO: 2450 - protein, 249 aa, Artificial Sequence
  Synthetic Polypeptide
ELQMTQSPSSLSASVGDRVTITCRASQSISSYLNWYQQKPGQPPKLLIYWASTRESGVPDRFSGSESGTNYTLTISSLQPEDFATYFCQQSDSLPITFGQGTRLDIQGGGGSGGGGSGGGGSEVQLLESGGGVVQPGRSLRLSCAASGFTFSSYGMHWVRQAPGKGLEWVAVISYDGSNKYYADSVKGRFTISRDNSKNTLYLQMNSLRAEDTAVYYCAKDMGWGSGWRPYYYYGMDVWGQGTTVTVSS

SEQ ID NO: 2451 - protein, 246 aa, Artificial Sequence
  Synthetic Polypeptide
DIQMTQSPSSLSASVGDRVTITCRASQSISSYLNWYQQKPGKAPKLLIYAASSLQSGVPSRFSGSGSGTDFTLTISSLQPEDLATYYCQQSYSTPFTFGPGTKVDIKGGGGSGGGGSGGGGSVHEVQLVQSGAEVKKPGSSVKVSCKASGGTFSSYAISWVRQAPGQGLEWMGGIIPIFGTANYAQKFQGRVTITADKSTSTAYMELSSLRSEDTAVYYCATFALFGFREQAFDIWGQGTTVTVSS

SEQ ID NO: 2452 - protein, 244 aa, Artificial Sequence
  Synthetic Polypeptide
DVVMTQTPLSLPVSLGDQASISCRSSQSLVHSNGNTYLRWYLQKPGQSPKVLIYKVSNRFSGVPDRFSGSGSGTDFTLKISRVEAEDLGVYFCSQSTHVPWTFGGGTKLEIKGGGGSGGGGSGGGGSEVKLDETGGGLVQPGRPMKLSCVASGFTFSDYWMNWVRQSPEKGLEWVAQIRNKPYNYETYYSDSVKGRFTISRDDSKSSVYLQMNNLRVEDMGIYYCTGSYYGMDYWGQGTSVTVS

SEQ ID NO: 2453 - protein, 255 aa, Artificial Sequence
  Synthetic Polypeptide
DVVMTQTPLSLPVSLGDQASISCRSSQSLVHSNGNTYLRWYLQKPGQSPKVLIYKVSNRVSGVPDRFSGSGSGTDFTLKINRVEAEDLGVYFCSQSTHVPWTFGGGTKLEIKSSADDAKKDAAKKDDAKKDDAKKDGGVKLDETGGGLVQPGGAMKLSCVTSGFTFGHYWMNWVRQSPEKGLEWVAQFRNKPYNYETYYSDSVKGRFTISRDDSKSSVYLQMNNLRVEDTGIYYCTGASYGMEYLGQGTSVTVST

SEQ ID NO: 2454 - protein, 251 aa, Artificial Sequence
  Synthetic Polypeptide
QVQLVESGGNLVQPGGSLRLSCAASGFTFGSFSMSWVRQAPGGGLEWVAGLSARSSLTHYADSVKGRFTISRDNAKNSVYLQMNSLRVEDTAVYYCARRSYDSSGYWGHFYSYMDVWGQGTLVTVSGGGGSGGGGSGGGGSSVLTQPSSVSAAPGQKVTISCSGSTSNIGNNYVSWYQQHPGKAPKLMIYDVSKRPSGVPDRFSGSKSGNSASLDISGLQSEDEADYYCAAWDDSLSEFLFGTGTKLTVLG

SEQ ID NO: 2455 - protein, 246 aa, Artificial Sequence
  Synthetic Polypeptide
DIQMTQSPSSLSASVGDRVTITCRTSQSLSSYTHWYQQKPGKAPKLLIYAASSRGSGVPSRFSGSGSGTDFTLTISSLQPEDFATYYCQQSRTFGQGTKVEIKGGGGSGGGGSGGGGSQVQLQQSGPGLVKPSQTLSLTCAISGDSVSSYNAVWNWIRQSPSRGLEWLGRTYYRSGWYNDYAESVKSRITINPDTSKNQFSLQLNSVTPEDTAVYYCARSGHITVFGVNVDAFDMWGQGTMVTVSS

SEQ ID NO: 2456 - protein, 245 aa, Artificial Sequence
  Synthetic Polypeptide
DIVLTQSPLSLAVSLGQPAIISCKASQSVSFAGTSLMHWYHQKPGQQPRLLIYRASNLEAGVPDRFSGSGSKTDFTLTISPVEAEDAATYYCQQSREYPYTFGGGTKLEIKRGGGGSGGGGSGGGGSQVQLVQSGAEVVKPGASVKISCKASGYTFTGYFMNWVKQSPGQSLEWIGRIHPYDGDTFYNQKFQGKATLTVDKSSNTAHMELLSLTSEDFAVYYCTRYDGSRAMDYWGQGTTVTVSS

SEQ ID NO: 2457 - protein, 249 aa, Artificial Sequence
  Synthetic Polypeptide
DLETTLTQSPATLSVSPGERVTLSCRASQSVGSNLAWYQQKFGQAPRLLIYDASTRATGIPARFSGSGSGTEFTLTISRLEPEDFAVYYCHQYGSSPRTFGQGTKVDIKRGGGGSGGGGSGGGGSQVQLVQSGAEVKKPGASVKVSCKASGYTFTTYGISWVRQAPGQGLEWMGWISAYNGHTNYAQMLQGRVTMTTDTSTSTAYMELRGLRSDDTAVYYCAREAYASYGSGSYWTDYWGQGTLVTVSS

SEQ ID NO: 2458 - protein, 241 aa, Artificial Sequence
  Synthetic Polypeptide
DVVMTQTPLSLPVTPGEPASISCRSSQSLVHRNGNTYLHWYLQKPGQSPKLLIHKVSNRFSGVPDRFSGSGSGTDFTLKISRVEAEDLGVYFCSQSTHVPPLTFGAGTKLELKGGGGSGGGGSGGGGSEVQLVQSGAEVEKPGASVKISCKASGSSFTGYNMNWVRQNIGKSLEWIGAIDPYYGGTSYNQKFKGRATLTVDKSTSTAYMHLKSLRSEDTAVYYCVSGMEYWGQGTSVTVSS

SEQ ID NO: 2459 - protein, 239 aa, Artificial Sequence
  Synthetic Polypeptide
EIVMTQTPATLSVSAGERVTITCKASQSVSNDVTWYQQKPGQAPRLLIYSASNRYSGVPARFSGSGYGTEFTFTISSVQSEDFAVYFCQQDYSSFGQGTKLEIKRGGGGSGGGGSGGGGSQVQLVESGPGVVQPGRSLRISCAVSGFSVTNYGVHWVRQPPGKGLEWLGVIWAGGITNYNSAFMSRLTISKDNSKNTVYLQMNSLRAEDTAMYYCASRGGHYGYALDYWGQGTLVTVSS

SEQ ID NO: 2460 - protein, 242 aa, Artificial Sequence
  Synthetic Polypeptide
DIQMTQTASSLPASLGDRVTISCSASQDISNYLNWYQQKPDGTVKLLIFYSSNLHSGVPSRFSGGGSGTDYSLTISNLEPEDIATYFCHQYSKLPWTFGGGTKLEIKRGGGGSGGGGSGGGGSEVTLVESGGDFVKPGGSLKVSCAASGFAFSHYAMSWVRQTPAKRLEWVAYISSGGSGTYYSDSVKGRFTISRDNAKNTLYLQMRSLRSEDSAMYFCTRVKLGTYYFDSWGQGTTLTVSS

SEQ ID NO: 2461 - protein, 244 aa, Artificial Sequence
  Synthetic Polypeptide
QFVLTQSPSASAALGASAKLTCTLSSAHKTYTIDWYQQQKGKAPRYLIQVKSDGTYTKATGVPDRFSGSSSGADRYLIIPSVQADDEADYYCGTDYTGGYVFGGGTQLTVTGGGGSGGGGSGGGGSEQLKESGGGLFKPTDTLTLTCTVSGFSLSYYGVNWVRQAPGNGLEWIGTIGGSGDTYYASWAKSRSTIIRNTNENTVTLKMTSLTAADTATYFCVRYANIGYEYFNVWGPGTLVTVSS

SEQ ID NO: 2462 - protein, 249 aa, Artificial Sequence
  Synthetic Polypeptide
QFVLTQSPSVSAALGASAKLTCTLSSAHKTYTIDWYQQQQGEAPRYLMQVKSDGSYTKGTGVPDRFSGSSSGADRYLIIPSVQADDEAGYVCGADDNGGYVFGGGTQLTVTGGGGSGGGGSGGGGSQSVKESEGGLFKPTDTLTLTCTVSGFSLSRHALTWVRQAPGNGLEWIGAIDNAGTTYYASWAKSRSTITRNTDLHTVTLKMTSLTASDTATYFCARVFYDINSGYYLDGMDLWGPGTLVTVSS

SEQ ID NO: 2463 - protein, 243 aa, Artificial Sequence
  Synthetic Polypeptide
DIQMTQSPSSLSASVGDRVTITCRASQGISSWLAWYQQKPEKAPKSLIYAASSLQSGVPSRFSGSGSGTDFTLTISSLQPEDFATYYCQQYNSYPPTFGGGTKVEIKGGGGSGGGGSGGGGSEVQLVESGGGLVQPGESLRLSCVASGFTFSRYKMNWVRQAPGKGLEWVSYISRSGRDIYYADSVKGRFTISRDNAKNSLYLQMNSLRDEDTAVYYCAGTVTTYYYFGMDVWGHGTTVTVSS

SEQ ID NO: 2464 - protein, 244 aa, Artificial Sequence
  Synthetic Polypeptide
DIQMTQSPSSLSASVGDRVTITCRASQGISSWLAWYQQKPEKAPKSLIYAASSLQSGVPSRFSGSGSGTDFTLTISSLQPEDFATYYCQQYNSYPPTFGGGTKVEIKGGGGSGGGGSGGGGSEVQLVESGGGSVQPGESLRLSCVASGFTFSRYKMNWVRQAPGKGLEWVSYISRSGRDIYYADSVKGRFTISRDNAKNSLYLQMNSLRDEDTAVYYCAGTVTTYYYDFGMDVWGQGTTVTVSS

SEQ ID NO: 2465 - protein, 243 aa, Artificial Sequence
  Synthetic Polypeptide
QSVLTQPPSASGTPGQRVTISCSGSRSNVGGNYVFWYQQVPGATPKLLIYRSNQRPSGVPDRFAGSKSGSSASLAISGLRSEDEADYYCATWDDSLSGFVFGTGTKVTVLGGGGGSGGGGSGGGGSEVQLVESGGGLVKPGGSLRLSCAASGFTFSDYYMSWIRQAPGKGLEWVSYISSSGSTIYYADSVKGRFTISRDNAKNSLYLQMNSLRAEDTAVYYCARGYGKAYDQWGQGTLVTVSS

SEQ ID NO: 2466 - protein, 242 aa, Artificial Sequence
  Synthetic Polypeptide
QSVVTQPPSMSAAPGQQVTISCSGGNSNIERNYVSWYLQLPGTAPKLVIFDNDRRPSGIPDRFSGSKSGTSATLGITGLQTGDEADYYCGTWDSSLRGWVFGGGTKLTVLGGGGGSGGGGSGGGGSEVQLVESGGGLIQPGGSLRLSCAASGFTFSNYAMNWVRQAPGKGLEWVSTINGRGSSTIYADSVKGRFTISRDNSKNTLYLQMNSLRAEDTATYYCARYISRGLGDSWGQGTLVTV

SEQ ID NO: 2467 - protein, 242 aa, Artificial Sequence
  Synthetic Polypeptide
QSVVTQPPSVSGAPGQRVTISCTGSSSNIGAGYDVHWYQQLPGTAPKLLIYGNSNRPSGVPDRFSGSKSGTSASLAITGLQAEDEADYYCQSYDSSLSGSYVFGTGTKLTVLGGGGGSGGGGSGGGGSEVQLVETGGNLVQPGASLRLSCAASGFSFSGTAMHWVRQAPGKGLEWVSTISSTGRSTYYRDSVKGRFTISRDNSKNTLYLQMNSLRGEDTAVYYCARVSFDYWGQGTLVTVSS

SEQ ID NO: 2468 - protein, 244 aa, Artificial Sequence
  Synthetic Polypeptide
QSVVTQPASVSGSPGQSITISCTGTSSDVGGYNYVSWYQQHPGKAPKLMIYDVSKRPSGVSNRFSGSKSGNTASLTISGLQAEDEADYYCSSYTSSSTLVFGGGTKLTVLGGGGGSGGGGSGGGGSEVQLVESGGAFVQPGGSLRLSCAASGFTFSSYAMTWVRQAPGKGLEWVSTISGRGRSTFYADSVKGRFTISRDNSKNTLYLQMNSLRAEDTAVYYCARYYHAGAFDLWGQGTLVTVSS

SEQ ID NO: 2469 - protein, 242 aa, Artificial Sequence
  Synthetic Polypeptide
DNIELTQSPAIMSASPGERVTMTCSASSSIRYIYWYQQKPGSSPRLLIYDTSNVAPGVPFRFSGSGSGTSYSLTINRMEAEDAATYYCQEWSGYPYTFGGGTKLDIKRGGGGSGGGGSGGGGSQVKLQESGGGLVKPGGSLKLSCAASGFTFSSYGMSWVRQTPDKRLEWVATISSGGSYTYYPDSVKGRFTISRDNAKNTLYLQMSSLKSEDTAMYYCARGNWEGWYFDVWGQGTTVTVSS

SEQ ID NO: 2470 - protein, 252 aa, Artificial Sequence
  Synthetic Polypeptide
DNFMLTQPHSVSESPGKTVTISCTGSGGSIDNNYVHWYQQRPGSAPTTVMFEDNQRPSGVPDRFSGSIDSSSNSASLVISGLKTEDEGDYYCQSSDGSKVVFGGGTKLTVLGQGGGGSGGGGSGGGGSEVQLVQSGGGSLTLSCAASGVVQPGRFTFSSYGMHWVRQAPGKGLEWVSVISYDGSNKYYADSVKGRFTISRDNSKNTLYLQMNSLRTEDTAVYYCAKTLSAGEWIGGGAFDIWGHGTMVTVSS

SEQ ID NO: 2471 - protein, 242 aa, Artificial Sequence
  Synthetic Polypeptide
DVVMTQTPLSLPVSLGDQASISCRSSQSLVHSNGNTYLHWYLQKPGQSPKLLIYKVSNRFSGVPDRFSGSGSGTDFTLKISRVEAEDLGVYFCSQNTPVPPKFGSGTKLEIKGGGGSGGGGSGGGGSQVQLQQSGAELVRPGASVKLSCKASGYTFNDYEMHWVKQTPVHGLKWIGALEPKTGDTAYSQKFKGKATLTADKSSSTAYMELRSLTSEDSAVYYCTSCYYYTYSGQGTLVTVSA

SEQ ID NO: 2472 - protein, 241 aa, Artificial Sequence
  Synthetic Polypeptide
DIQLTQSPSSLSASVGDRVTITCRASQGIRNDLGWYQQKPGKAPKRLIYAASSLQNGVPSRFSGSGSGTEFTLTISSLQPEDFATYYCLQHNTYPAFGQGTKVEIKRGGGGSGGGGSGGGGSQVQLQESGPGLVKPSQTLSLTCTVSGGSISSFNYYWSWIRHHPGKGLEWIGYIYYSGSTYSNPSLKSRVTISVDTSKNQFSLTLSSVTAADTAVYYCARGYNWNYFDYWGQGTLVTVSS

SEQ ID NO: 2473 - protein, 242 aa, Artificial Sequence
  Synthetic Polypeptide
DIVLTQSPASLAVSLGQSVTISCRASESVEYYGTSLMQWYQQKPGQPPKLLIYATSNVESGVPARFSGSGSGTDFSLNIHPVEEDDIAMYFCQQSRKLPSTFGGGTKLEIKGGGGSGGGGSGGGGSDVRLQESGPGQVKPSQTVSLTCSVTGYSITNGNHWWNWIRQVSGSKLEWIGYISSSGSTDSNPSLKSRISITRDTSKNQLFLQLNSVTTEDIATYYCARGYYFDYWGQGTTLTVSS

SEQ ID NO: 2474 - protein, 241 aa, Artificial Sequence
  Synthetic Polypeptide
DQSVLTQPPSVSVAPGKTARIPCEGNYIGSSNVHWYQQKPGQAPVLVIHFDSDRPSGIPDRFSGSNSGNMATLTISRVEAGDEADYYCQVWENHGWVFGGGTKLTVLSGGGGSGGGGSGGGGSEVQLVETGGGLVQPGESLRLSCAASGFTFSDYEMNWVRQAPGKGLEWVSYISSSGSTIYYADSVKGRFTIYRDNAKNSLYLQMNSLRAEDTALYYCARAWGVGPPDYWGQGTLVTVSS

SEQ ID NO: 2475 - protein, 249 aa, Artificial Sequence
  Synthetic Polypeptide
DIQMTQSPSSLSASVGDTVTITCQANGYLNWYQQRRGKAPKLLIYDGSKLERGVPSRFSGRRWGQEYNLTINNLQPEDIATYFCQVYEFVVPGTRLDLKRTVAAPGGGGSGGGGSGGGGSQVQLLQSGAAVTKPGASVRVSCEASGYNIRDYFIHWWRQAPGQGLQWVGWINPKTGQPNNPRQFQGRVSLTRHASWDFDTFSFYMDLKALRSDDTAVYFCARQRSDYWDFDVWGSGTQVTVSSASTKGP

SEQ ID NO: 2476 - protein, 255 aa, Artificial Sequence
  Synthetic Polypeptide
QSALTQPPSASGSPGQSITISCTGTSNNFVSWYQQHAGKAPKLVIYDVNKRPSGVPDRFSGSKSGNTASLTVSGLQTDDEAVYYCGSLVGNWDVIFGGGTKLTVLGGGGSGGGGSGGGGSQPQLQESGPTLVEASETLSLTCAVSGDSTAACNSFWGWVRQPPGKGLEWVGSLSHCASYWNRGWTYHNPSLKSRLTLALDTPKNLVFLKLNSVTAADTATYYCARFGGEVLRYTDWPKPAWVDLWGRGTLVTVSS

SEQ ID NO: 2477 - protein, 240 aa, Artificial Sequence
  Synthetic Polypeptide
EIVLTQSPGTLSLSPGETAIISCRTSQYGSLAWYQQRPGQAPRLVIYSGSTRAAGIPDRFSGSRWGPDYNLTISNLESGDFGVYYCQQYEFFGQGTKVQVDIKRGGGGSGGGGSGGGGSQVQLVQSGGQMKKPGESMRISCRASGYEFIDCTLNWIRLAPGKRPEWMGWLKPRGGAVNYARPLQGRVTMTRDVYSDTAFLELRSLTVDDTAVYFCTRGKNCDYNWDFEHWGRGTPVIVSS

SEQ ID NO: 2478 - protein, 250 aa, Artificial Sequence
  Synthetic Polypeptide
ELVLTQSPGTLSLSAGERATLSCRASQSVSSGSLAWYQQKPGQAPRLLIYGASTRATGIPDRFSGSGSGTDFTLTIGRLEPEDLAVYYCQQYGTSPYTFGQGTKLEIGGGGSGGGGSGGGGSLEQSGAEVKKPGSSVQVSCKASGGTFSMYGFNWVRQAPGHGLEWMGGIIPIFGTSNYAQKFRGRVTFTADQATSTAYMELTNLRSDDTAVYYCARDFGPDWEDGDSYDGSGRGFFDFWGQGTLVTVSS

SEQ ID NO: 2479 - protein, 246 aa, Artificial Sequence
  Synthetic Polypeptide
DVVMTQSPSSLSASVGDRVTITCQSSLDISHYLNWYQQKPGKAPKLLIYDASNLETGVPSRFSGSGSGTHFTFTISSLQPEDFATYYCQQYDNLPLTFGGGTKLEIKRGGGGSGGGGSGGGGSQVQLVQSGGGVVQPGGSLRVSCAASGVTLSDYGMHWVRQAPGKGLEWVAFIRNDGSDKYYADSVKGRFTISRDNSEKTVSLQMSSLRAEDTAVYYCAKNGESGPLDYWYLDLWGRGTLVTVSS

SEQ ID NO: 2480 - protein, 245 aa, Artificial Sequence
  Synthetic Polypeptide
DIVMTQSQDSMATSVGERVTVNCKASQNVDTNVAWYQQKPGQSPEPLLFSASYRYTGVPDRFSGSGSGTDFTLTISSVQAEDVAEYFCQQYNSYPLTFGQGTKLEIKRGGGGSGGGGSGGGGSEVQVEVSGGGLVQPGGSMRLSCAVSGFTFSNYWMNWVRQSPEKGLEWIAEIRLKSNNFARYYAESVKGRFTISRDNSKNSLYLQMISLRAEDTAIYYCTSYGNYVGHYFDHWGQGTLLTVSS

SEQ ID NO: 2481 - protein, 250 aa, Artificial Sequence
  Synthetic Polypeptide
SYELTQPPSVSGTPGQRVAISCSGSSSNIGTRMVTWYQHVPGTAPKLLIFNNNQRPSGVPDRFSASKSGTSASLAIIGLQSDDEADYYCATWDDNVKSYVFGTGTKVTVLGSRGGGGSGGGGSGGGGSLEMAQVQLQQWGAGLLKPSETLSLTCAVYGGSFSGYYWSWIRQPPGKGLEWIGEINHSGSTNYNPSLKSRVTISVDTSKNQFSLKLSSVTAADTAVYYCARAPQSWYVGDVWGQGTLVTVSS

SEQ ID NO: 2482 - protein, 247 aa, Artificial Sequence
  Synthetic Polypeptide
QSVLTQPPSLSVAPGKTASITCGGNNIGMKSVHWYQQRPGQAPVLVIYYDSDRPSGIPGRFSGSNSGNTATLTISRVEAGDEADYYCQVWDTTGDHPGYVFGTGTKVTVLGGGGSGGGGSGGGGSQVQLVQSGAEVKKPGSSVKVSCKASGGTFSSYAISWVRQAPGQGLEWMGGIIPIFGTANYAQKFQGRVTITADESTSTAYMELSSLRSEDTAVYYCARGVYGYSGSAPYDEWGQGTLVTVSS

SEQ ID NO: 2483 - protein, 252 aa, Artificial Sequence
  Synthetic Polypeptide
EIVLTQSPLSLPVTPGEPASISCRSSQSLLHSNGYNYLDWYLQKPGQSPQLLIYLGSNRASGVPDRFSGSGSGTDFTLKISRVEAEDVGVYYCMQALQTPRTFGQGTKVEIKRGGGGSGGGGSGGGGSQVQLVQSGGGVVQPGRSLRLSCAASGFTFSSYGMHWVRQAPGKGLEWVAVISYDGSNKYYADSVKGRFTISRDNSKNTLYLQMNSLRAEDTAVYYCARDFDYGDSYYYYGMDVWGQGTTVTVSS

SEQ ID NO: 2484 - protein, 246 aa, Artificial Sequence
  Synthetic Polypeptide
EIVLTQSPATLSLSPGERATLSCRASQSVGSYLAWYQQKPGAPRLLIYDASHRATGIPARFSGSGSGTDFTLTISSLEPEDFAVYYCQQRSNWPPMYTFGQGTKLEIKRGGGGSGGGGSGGGGSEVQLVQSGAEVSVKVSCKASGGKKPGSTFSSYTISWVRQAPGQGLEWMGGIIPIFGTANYAQKFQGRVTITADKSTSTAYMELSSLRSEDTAVYYCAGDTDSSGYYGAVDYWGQGTLVTVSS

SEQ ID NO: 2485 - protein, 230 aa, Artificial Sequence
  Synthetic Polypeptide
DIQMTQSPSSLSASVGDRVTITCQASQDINNYLNWYQQKPGKAPKLLIYDASNLQTGVPSRFSGSGSGTDFTFTIEDIATYYCQQYTFGPGTKVDIKGGGGSGGGGSGGGGSEVQLLESGGGLVQPGGSLRLSCAASGFTFSWYSMTWVRQAPGKGLEWVSSIVPWGDFTQYADSVKGRFTISRDNSKNTLYLQMNSLRAEDTAVYYCAKGPGWGSFDLWGRGTLVTVSS

SEQ ID NO: 2486 - protein, 240 aa, Artificial Sequence
  Synthetic Polypeptide
DIQMTQSPSSLSASVGDRVTITCTASLSVSSTYLHWYQQKPGSSPKLWIYSTSNLASGVPSRFSGSGSGTSYTLTISSLQPEDFATYYCHQYHRSPLTFGGGTKVEIKRGGGGSGGGGSGGGGSEVQLVESGGGLVQPGGSLRLSCAASGFSLTKYGVHWVRQAPGKGLEWVGVKWAGGSTDYNSALMSRFTISKDNAKNSLYLQMNSLRAEDTAVYYCARDHRDAMDYWGQGTLVTVSS

SEQ ID NO: 2487 - protein, 244 aa, Artificial Sequence
  Synthetic Polypeptide
DIQMTQSPSSLSASVGDRVTITCKASQDVGTAVAWYQQKPGKAPKLLIYSASYRSTGVPSRFSGSGSGTDFTLTISSLQPEDFATYYCQHHYSAPWTFGGGTKVEIKGGGGSGGGGSGGGGSEVQLVESGGGLVQPGGSLRLSCAASGFTFSRNGMSWVRQAPGKGLEWVATVSSGGSYIYYADSVKGRFTISRDNAKNSLYLQMNSLRAEDTAVYYCARQGTTALATRFFDVWGQGTLVTVSS

SEQ ID NO: 2488 - protein, 250 aa, Artificial Sequence
  Synthetic Polypeptide
DIVMTQSPSSLTMSVGQKVTMSCKSSHSLLNSRNQKNYLAWFQQKPGQSPKLLVYFASTRESGVPDRFIGSGSGTDFTLTISNVQAEDLADYFCQQHYTTLPTFGGGTKLEIKGGGGSGGGGSGGGGSQIQLVQSGPDLKKPGETVKISCKASGYTFTNTGMNWVKQAPGKGLKWMGWINTYTGEPTYADDFKGRFTFSLETSASTAYLQINNLKNEDTATYFCTRWGYGSSLYYAMDYWGQGTSVTVSS

SEQ ID NO: 2489 - protein, 240 aa, Artificial Sequence
  Synthetic Polypeptide
DIQMTQSPPSLSASVGGKVTITCKASQDIDRYMAWYQDKPGKGPKLLIHDTSTLQPGIPSRFSGSGSGRDYSFSISNLEPEDIATYYCLQYDNLWTFGGGTKLEIKRGGGGSGGGGSGGGGSQVQLVQSGAELVKPGASVKMSCKASGYIFTNYNIHWVKKSPGQGLEWIGAIYPGNGDAPYSQKFQDRATLTADTSSSTTYMELSSLTSEDSAVYYCVRANWDVAFAYWGQGTLVSVSS

SEQ ID NO: 2490 - protein, 241 aa, Artificial Sequence
  Synthetic Polypeptide
DIQMTQSPASLSASVGETVTITCRVSGNIHNYLAWYQQKQGKSPQLLVYNAKTLADGVPSRFSGSGSGTQYSLKINSLQPEDFGSYYCQHFWSNPYTFGGGTKLEIKGGGGSGGGGSGGGGSQVQLQQSGASVKVSCKASELVRPGTGYAFTNYLIEWVKQRPGQGLEWIGVINPGSGGTNYNEKFKGKATLTADKSSSTAYMQLSSLTSDDSAVYFCARYRSYDWYFDVWGAGTTVTVSS

SEQ ID NO: 2491 - protein, 245 aa, Artificial Sequence
  Synthetic Polypeptide
DIQMTQSPSSLSASVGDRVTITCRSSQRIVHSNGNTYLEWYQQTPGKAPKLLIYKVSNRFSGVPSRFSGSGSGTDYTPTISSLQPEDIATYYCFQGSHVPPTFGQGTKLQITGGGGSGGGGSGGGGSEVQLVESGGGVVQPGRSLRLSCSSSGPTFSDYYMYWVRQAPGKGLEWVAYMSNVGAITDYPDTVKGRPTISRDNSKNTLFLMDSLRPEDTGVYFCARGTRDGSWFAYWGQGTPVTVSS

SEQ ID NO: 2492 - protein, 240 aa, Artificial Sequence
  Synthetic Polypeptide
DIQMTQSFSSLSASVGDRVTITCRASQDISNYLNWYQQKPGKAPKLLIYYTSRLHSGVPSRFSGSGSGTDYTLTISSLQPEDFATYFCQQGNTLPWTFGGGTKLEIKRGGGGSGGGGSGGGGSEVQLVQSGGGLVQSGGSLRLSCRASGYTFTRYWMLWVRQRPGKGLEWVAEINPRNDRTNYNEKFKTRFTISVDRSKNTLYLQMDSLRAEDTAVYFCALGGGYAMDYWGQGTLVTVSS

SEQ ID NO: 2493 - protein, 241 aa, Artificial Sequence
  Synthetic Polypeptide
DIQMTQSPASLSASVGETVTIICRASVNIYSYLAWYQQKQGKSPQLLVYNAKILAEGVPSRFSGSGSGTQFSLKINSLQPEDFGSYYCQHHYGTFTFGSGTKLEIKRGGGGSGGGGSGGGGSQVQLKESGPGLVAPSQSLSITCTISGFSLTSYGVHWVRQPPGKGLEWLVVIWSDGSTTYNSALKSRLSISKDNSKSQVFLKMNSLQTDDTAIYYCASHYGSTLAFASWGHGTLVTVSAA

SEQ ID NO: 2494 - protein, 249 aa, Artificial Sequence
  Synthetic Polypeptide
DIVMTQSHKFMSTSVGDRVSVTCKASQNVGNNVAWYQQKPGQSPKVLIYSASYRYSGVPDRFTGSGSGTDFTLTISNVQSEDLAEYFCQQYNTYPFTFGSGTKLEIKGGGGSGGGGSGGGGSEVQLEESGGGLVQPGGSMKLSCVASGFTFSNYWMNWVRQSPEKGLEWVAEIRFKSHNYATHFAESVKGRFTISRDDSKSSVYLQMNNLRAEDTGIYYCTRRIGNSDYDWWYFDVWGAGTSVTVSSAS

SEQ ID NO: 2495 - protein, 244 aa, Artificial Sequence
  Synthetic Polypeptide
DIQLTQSPSSLSASVGDRVTITCKASQSVDYEGDSFLNWYQQKPGKAPKLLIYAASNLESGVPSRFSGSGSGTDFTLTISSLQPEDFATYYCQQSNEDPLTFGQGTKVEIKRGGGGSGGGGSGGGGSEVQLVESGGGLVQPGGSLRLSCAASGYTFSSYWIEWVRQAPGKGLEWIGEILPGGGDTNYNEIFKGRATFSADTSKNTAYLQMNSLRAEDTAVYYCTRRVPIRLDYWGQGTLVTVSS

SEQ ID NO: 2496 - protein, 251 aa, Artificial Sequence
  Synthetic Polypeptide
DQSVLTQPPSVSGAPGQRVTISCTGSSSNIGAGYDVHWYQQLPGTAPKLLIYGNSNRPSGVPDRFSGSKSGTSASLAITGLQAEDEADYYCQSYDNSLSSWVFGGGTKLTVLGQPKGGGGSGGGGSGGGGSEVQLQQSGAEVKKPGSSVKVSCKASGGTFSSYAISWVRQAPGQGLEWMGRIIPILGIANYAQKFQGRVTITADKSTSTAYMELSSLRSEDTAVYYCARDVGSGSYSLDYWGQGTLVTVSS

SEQ ID NO: 2497 - protein, 248 aa, Artificial Sequence
  Synthetic Polypeptide
DQSVVTQPPSVSAAPGRKVTISCSGSSSNIGSNYVSWYQQVPGTAPKLLIYEDDKRPSGIPDRFSGSKSGTSATLGITGLQTGDEADYFCATWDRTVNVVRFGGGTRLTVHSQPKGGGGSGGGGSGGGGSQLQLQESGPGLVKPSETLSLTCTVSGGSISSSSYYWGWIRQPPGKGLEWIGSIYYSGSTYYNPSLKSRVTISVDTSKNQFSLKLSSVTAADTAVYYCARHVGHELDYWGQGTLVTVSS

SEQ ID NO: 2498 - protein, 242 aa, Artificial Sequence
  Synthetic Polypeptide
DIQMTQSPSSLSASVGDRVTITCRASQSISSYLNWYQQKPGKAPKLLIYAASSLQSGVPSGFSGSGSGTDFTLTISSLQPEDFATYYCQQSYSTPLTFGGGTKVEIKRGGGGSGGGGSGGGGSQVQLQESGPGLVKPSETLSLTCTVSGGSVSSGSYYWSWIRQPPGKGLEWIGYIYYSGSTNYNPSLKSRVTISVDTSKNQFSLKLSSVTAADTAVYYCAREGKNGAFDIWGQGTMVTVSS

SEQ ID NO: 2499 - protein, 242 aa, Artificial Sequence
  Synthetic Polypeptide
DQIVLTQSPAIMSASPGEKVTISCSASSSVSYMYWYQQKPGSSPKPWIYRTSNLASGVPARFSGSGSGTSYSLTISNMEAEDAAAYYCQQYHSYPTTFGGGTKLEVKGGGGSGGGGSGGGGSEVQLVESGGGLVQPKGSLKLSCAASGFSFNTYAMNWVRQAPGKGLEWIAHIRSKSNNFATYYADSVKDRFSISRDASENILFLQMNNLKTEDTAMYYCVRQGGDFPMDYWGQGTSVTVSS

SEQ ID NO: 2500 - protein, 240 aa, Artificial Sequence
  Synthetic Polypeptide
DIQMTQSSSSFSVSLGDRVTITCMASEDIYIRLAWYQQKPGNAPRLLISAATSLETGVPSRFSGSGSGKDYTLSITSLQTEDVGTYYCQQYWSSPWTFGGGTKLEINGGGGSGGGGSGGGGSDVQLQESGPGLVKPSQSLSLTCTVTGYSITSDYTWNWIRQFPGNKLEWMGYITYSGSTSYNPSLKSRNSITRDTSKNQFFLQLNSVTTEDTATYYCARLGRRYTMDYWGQGTSVTVSS

SEQ ID NO: 2501 - protein, 240 aa, Artificial Sequence
  Synthetic Polypeptide
DVQLQESGPGLVKPSQSLSLTCTVTGYSITSDYTWNWIRQFPGNKLEWMGYITYSGSTSYNPSLKSRNSITRDTSKNQFFLQLNSVTTEDTATYYCARLGRRYTMDYWGQGTSVTVSSGGGGSGGGGSGGGGSDIQMTQSSSSFSVSLGDRVTITCMASEDIYIRLAWYQQKPGNAPRLLISAATSLETGVPSRFSGSGSGKDYTLSITSLQTEDVGTYYCQQYWSSPWTFGGGTKLEIN

SEQ ID NO: 2502 - protein, 241 aa, Artificial Sequence
  Synthetic Polypeptide
DIQMTQSSSSFSVSLGDRVTITCKASEDIYIRLAWYQQKPGNAPRLLISAATSLETGIPSRFSGSGSGEDYTLTITSLQTEDVATYYCQQYWTTPWTFGGGTKLEIKRGGGGSGGGGSGGGGSDVQLQESGPGLVKPSQSLSLTCTVTGYSITIDYTWNWIRQFPGNKLEWMGYITYSGSTDYNPSLKSRSSITRDTSMNQFFLQLNSVTTEDTATYYCARLGRRYALDYWGQGTSVTVSS

SEQ ID NO: 2503 - protein, 242 aa, Artificial Sequence
  Synthetic Polypeptide
DIVMTQAAPSIPVTPGESVSISCRSDKSLLHSNGNTYLFWFLQRPGQSPQLLIYRMSNLASGVPDRFSGSGSGTAFTLRISGVEAEDVGVYYCMQHLEYPYTFGGGTKLEIKGGGGSGGGGSGGGGSQVQLQQSGPELVKPGASVKMSCKASGYAFSSSWLNWVRQRPGKGLEWIGRIYPGDGENHYNGKFKGKATLTADKSSSTGYMQLSSLTSEDSAVYFCASYYEGGYWGQGTLITVSA

SEQ ID NO: 2504 - protein, 241 aa, Artificial Sequence
  Synthetic Polypeptide
DIVLTQSPASLAVSLGQSVTISCRASESVEYYGTSLMQWYQQKPGQPPKLLIYGASNVESGVPARFSGSGSGTDFSLNIHPVEEDDIAMYFCQQSRKVPWTFGGGTKLEIKGGGGSGGGGSGGGGSEVKLVESGGGLVKPGGSRKLSCAASGFTFSSYTMSWVRQTPAKRLEWVATISSGSSTIYYADTVKGRFTISRDNAKNTLFLQMTSLRSEDTAMYYCARRWFLDCWGQGTTLTVSS

SEQ ID NO: 2505 - protein, 244 aa, Artificial Sequence
  Synthetic Polypeptide
DQVQLQQSGPGLVKPSETLSLTCTVSGDSISSYYWSWIRQPPGKGLEWIGYIYYSGSTNYNPSLKSRVTISVDTSKSQFSLKLSSVTAADTAVYYCARGRYFDVWGRGTMVTSSGGGGSGGGGSGGGGSSSYVLTQPPSVSGSPGQSITISCTGTSSDVGGYNYVSWYQQHPGKAPKLMIYEGSKRPSGVSNRFSGSKSGNTASLTISGLQAEDEADYYCSSYTTRSTRVFGGGTKLTVLGAAA

SEQ ID NO: 2506 - protein, 245 aa, Artificial Sequence
  Synthetic Polypeptide
DIVMTQSPLSLPVTPGEPASISCRSSKSLLHSNGNTYLYWFQQKPGQAPRLLIYRMSNLASGVPDRFSGSGSGTAFTLKISRVEAEDVGVYYCMQHIEYPFTFGQGTKLEIKGGGGSGGGGSGGGGSQVQLVQSGPEVKKPGASVKVSCKASGYTFTNSWMNWVRQRPGKGLEWIGRIYPGDGETIYNGKFRVRVTITADESTSTAYMELSSLRSEDTAVYYCARGYDDYSFAYWGQGTTVTVSS

SEQ ID NO: 2507 - protein, 244 aa, Artificial Sequence
  Synthetic Polypeptide
EIVMTQSPATLSLSPGERATLSCRASQSVSSYLAWYQQKPGQAPRLLIYDASNRATGIPARFSGSGSGTDFTLTISSLEPEDFAVYYCHQYGSSPQTFGQGTKVEIKRGGGGSGGGGSGGGGSEVQLVQSGAEVKKPGSSVKVSCKASGGTFSSYAISWVRQAPGQGLEWMGGIIPIFGTANYAQKFQGRVTITADESTSTAYMELSSLRSEDTAVYYCAVHYGDYVFSSMDVWGQGTTVTVSS

SEQ ID NO: 2508 - protein, 247 aa, Artificial Sequence
  Synthetic Polypeptide
ETTLTQSPGTLSLSPGERATLSCRASQSVSSSYLAWYQQKPGQAPRLLIYGASSRATGIPDRFSGSGSGTDFTLTISRLEPEDFAVYYCQQYGSSPRTFGQGTKVEIKRGGGGSGGGGSGGGGSEVQLVQSGAEVKKPGSSVKVSCKASGGTFSSYAISWVRQAPGQGLEWMGGIIPIFGTANYAQKFQGRVTITADESTSTAYMELSSLRSEDTAVYYCARGPEYCINGVCSLDVWGQGTTVTVSS

SEQ ID NO: 2509 - protein, 250 aa, Artificial Sequence
  Synthetic Polypeptide
DIELTQSPSSLAVSAGEKVTMSCKSSQSLLNSRTRKNQLAWYQQKPGQSPELLIYWASTRQSGVPDRFTGSGSGTDFTLTISSVQAEDLAVYYCQQSYNLLTFGPGTKLEVKRGGGGSGGGGSGGGGSVKLQESGGGFVKPGGSLKVSCAASGFTFSSYAMSWVRLSPEMRLEWVATISSAGGYIFYSDSVQGRFTISRDNAKNTLHLQMGSLRSGDTAMYYCARQGFGNYGDYYAMDYWGQGTTVTVSS

SEQ ID NO: 2510 - protein, 249 aa, Artificial Sequence
  Synthetic Polypeptide
DIQMTQSPSSLSASVGDRVTITCRSSQNIVHSNGNTYLDWYQQTPGKAPKLLIYKVSNRFSGVPSRFSGSGSGTDFTFTISSLQPEDIATYYCFQYSHVPWTFGQGTKLQIGGGGSGGGGSGGGGSQVQLQQSGAEVKKPGSSVKVSCKASGYTFTNYYIYWVRQAPGQGLEWIGGINPTSGGSNFNEKFKTRVTITADESSTTAYMELSSLRSEDTAFYFCTRQGLWFDSDGRGFDFWGQGTTVTVSS

SEQ ID NO: 2511 - protein, 239 aa, Artificial Sequence
  Synthetic Polypeptide
EIVLTQSPGTLSLSPGERATLSCRASQSVSSSYLAWYQQKPGQAPRLLIYGASSRATGIPDRFSGSGSGTDFTLTISRLEPEDFAVYYCQQYGSSPWTFGQGTKVEIKRGGGGSGGGGSGGGGSQVHLQESGPGLVKPSETLSLTCTVSDDSISSYYWSWIRQPPGKGLEWIGHISYSGSANYNPSLKSRVTISVDTSKNQFSLKLSSVTAADTAVYYCANWDDAFNIWGQGTMVTVSS

SEQ ID NO: 2512 - protein, 241 aa, Artificial Sequence
  Synthetic Polypeptide
DVVMTQTPLTLSVTIGQPASISCKSSQSLLDSDGKTYLHWLLQRPGQSPKRLIFLVSKLDSGVPDRFTGSGSGTDFTLKISRVEAEDLGVYYCWQGTHFPQTFGGGTKLEIKGGGGSGGGGSGGGGSVQLQESGPDLVKPSQSLSLTCTVTGYSITSGYSWHWIRQFPGNKLEWMGYIHYSGDTDYNPSLKSRFSITRDTSKNQFFLQLNSVTTEDTATYYCATPGGFVYWGQGTLVTVSS

SEQ ID NO: 2513 - protein, 245 aa, Artificial Sequence
  Synthetic Polypeptide
DQSELTQPRSVSGSPGQSVTISCTGTERDVGGYNYVSWYQQHPGKAPKLIIHDVIERSSGVPDRFSGSKSGNTASLTISGLQAEDEADYYCWSFAGGYYVFGTGTDVTVLGGGGSGGGGSGGGGSFEVQLLESGGGLVQPGGSLRLSCAASGFTFSTYQMSWVRQAPGKGLEWVSGIVSSGGSTAYADSVKGRFTISRDNSKNTLYLQMNSLRAEDTAVYYCAGELLPYYGMDVWGQGTTVTVSS

SEQ ID NO: 2514 - protein, 244 aa, Artificial Sequence
  Synthetic Polypeptide
DQSELTQPRSVSGSPGQSVTISCTGTERDVGGYNYVSWYQQHPGKAPKLIIHDVIERSSGVPDRFSGSKSGNTASLTISGLQAEDEADYYCWSFAGGYYVFGTGTDVTVLGGGGSGGGGSGGGGSEVQLLESGGGLVQPGGSLRLSCAASGFTFSTYEMHWVRQAPGKGLEWVSVILSSGGETNYADSVKGRFTISRDNSKNTLYLQMNSLRAEDTAVYYCAGMLLPYYGMDVWGQGTTVTVSS

SEQ ID NO: 2515 - protein, 241 aa, Artificial Sequence
  Synthetic Polypeptide
DIQMTQSPSSLSASVGDRVTITCRASQDVSTAVAWYQQKPGKAPKLLIYSASFLYSGVPSRFSGSGSGTDFTLTISSLQPEDFATYYCQQYLYHPATFGQGTKVEIKRGGGGSGGGGSGGGGSEVQLVESGGGLVQPGGSLRLSCAASGFTFSDSWIHWVRQAPGKGLEWVAWISPYGGSTYYADSVKGRFTISADTSKNTAYLQMNSLRAEDTAVYYCARRHWPGGFDYWGQGTLVTVSS

SEQ ID NO: 2516 - protein, 242 aa, Artificial Sequence
  Synthetic Polypeptide
AIVMTQTPSPVSAAVGGTVTINCQASESVYSNNYLSWFQQKPGQPPKLLIYLASTLASGVPSRFKGSGSGTQFTLTISGVQCDDAATYYCIGGKSSSTDGNAFGGGTEVVVRGGGGSGGGGSGGGGSQSLEESGGRLVKPDETLTITCTVSGIDLSSNGLTWVRQAPGEGLEWIGTINKDASAYYASWAKGRLTISKPSSTKVDLKITSPTTEDTATYFCGRIAFKTGTSIWGPGTLVTVSS

SEQ ID NO: 2517 - protein, 240 aa, Artificial Sequence
  Synthetic Polypeptide
DIQMTQSPSSLSASVGDRVTITCRASQGISSWLAWYQQKPEKAPKSLIYAASSLQSGVPSRFSGSGSGTDFTLTISSLQPEDFATYYCQQYNSYPYTFGQGTKLEIKGGGGSGGGGSGGGGSQVQLVQSGAEVKKPGASVKVSCKASGYTFTSYDVHWVRQAPGQRLEWMGWLHADTGITKFSQKFQGRVTITRDTSASTAYMELSSLRSEDTAVYYCARERIQLWFDYWGQGTLVTVSS

SEQ ID NO: 2518 - protein, 258 aa, Artificial Sequence
  Synthetic Polypeptide
DIVMTQSPLSLPVTPGEPASISCRSSQSLLHSNGYNYLVWYLQKPGQSPQLLIYLGSIRASGVPDRFSGSGSGTDFTLKISRVEAEDVGVYYCMQPLQTPITFGQGTRLEIKRGGGGSGGGGSGGGGSGLQCVAAPRWVLSQVQLQQWGAGLLKPSETLSLTCAVYGGSFSGNYWSWIRQPPGKGLEWIGEINHSGSTNYNPSLKSRVTISVDTSKNQFSLKLSSVTAADTAVYYCARGGSYNYFDYWGQGTLVTVSS

SEQ ID NO: 2519 - protein, 255 aa, Artificial Sequence
  Synthetic Polypeptide
QLTQSPSSVSASVGDRVTITCRASRGISSWLAWYQQKPGKAPKLLIYTASSLQSGVPSRFSGSGSGTDFTLTISSLQPEDFATYYCQQAYSFPRTFGQGTKVEIKRGGGGSGGGGSGGGGSVAAPRWVLSQVQLQESGPGLVKPSQTLSLTCTVSGGSISSGGYYWIWIRQHPGKGLEWIGYIYYNGNTYYNPSLKSRVTMSVDTSKNQFSLKLSSVTAADTAVYYCARDGITMIRGYYYGMDVWGQGTTVTVSS

SEQ ID NO: 2520 - protein, 230 aa, Artificial Sequence
  Synthetic Polypeptide
DIVVTQSPASLAVSLGQRATISYRASKSVSTSGYSYMHWNQQKPGQPPRLLIYLVSNLESGVPARFSGSGSGTDFTLNIHPVEEEDAATYYCQHIRELTRSEGGPSWKGGGGSGGGGSGGGGSEVKLEESGGDLVKPGGSLKLSCAASGFTFSGYGMSWVRQTPDKRLEWVATISSGGSYTYYPDSVKGRFTISRDNAKNTLYLQMSSLKSEDTAMYYCARHEGGYYGSS

SEQ ID NO: 2521 - protein, 245 aa, Artificial Sequence
  Synthetic Polypeptide
DIQMTQSPSSLSASVGDRVTITCRASQGISNYLAWYQQKTGKVPKFLIYEASTLQSGVPSRFSGGGSGTDFTLTISSLQPEDVATYYCQNYNSAPFTFGPGTKVDIKGGGGSGGGGSGGGGSQVQLVESGGGVVQPGRSLRLSCAASGFAFSRYGMHWVRQAPGKGLEWVAVIWYDGSNKYYADSVKGRFTISRDNSKNTQYLQMNSLRAEDTAVYYCARGGDFLYYYYYGMDVWGQGTTVTVSS

SEQ ID NO: 2522 - protein, 237 aa, Artificial Sequence
  Synthetic Polypeptide
DIQMTQSPSSLSTSVGDRVTLTCKASQDVGTAVDWYQQKPGPSPKLLIYWASTRHTGIPSRFSGSGSGTDFTLTISSLQPEDFADYYCQQYNSYPLTFGPGTKVDIKGGGGSGGGGSGGGGSEVQLVQSGPEVKKPGATVKISCKTSGYTFTEYTIHWVKQAPGKGLEWIGNINPNNGGTTYNQKFEDKATLTVDKSTDTAYMELSSLRSEDTAVYYCAAGWNFDYWGQGTLLTVSS

SEQ ID NO: 2523 - protein, 238 aa, Artificial Sequence
  Synthetic Polypeptide
DIQMTQSPSSLSASVGDRVTITCKASQDIYPYLNWFQQKPGKAPKTLIYRTNRLLDGVPSRFSGSGSGTDFTFTISSLQPYYCLQYDEFPLTFGAGTKLEIKRGGGGSGGGGSGGGGSQITLKESGPTLVKPTQTLTLTCTFSGFSLSTSNMGVGWIRQPPGKALEWLAHIWWDDDKYYSPSLKSRLTITKDTSKNQVVLTMTNMDPVDTATYYCVRSNYGYAWFAYWGQGTLVTVSS

SEQ ID NO: 2524 - protein, 238 aa, Artificial Sequence
  Synthetic Polypeptide
DIVMTQSQKFMSTSVGDRVNVTCKASQNVGTNVVWYQQKTGQSPKALIHSASYRYSGVPDRFTGSGSGTDFTLTLSNVQSEDLAEYFCQHYNSFPYTFGGGTKLEIKRGGGGSGGGGSGGGGSQVQLQQSGAELVRPGVSVKISCKGSGYRFTDYPIHWVKQSHAKSLEWIGIISTYYGDVTNNPKFRGKATMTVDKSSTTAYMELARLTSEDSAIYYCARNDLFAYWGQGTLVTVSA

SEQ ID NO: 2525 - protein, 241 aa, Artificial Sequence
  Synthetic Polypeptide
DIKMTQSPSSMYASLGERVTITCKASPDINSYLSWFQQKPGKSPKTLIYRANRLVDGVPSRFSGGGSGQDYSLTINSLEYEDMGIYYCLQYDEFPYTFGGGTKLEMKGGGGSGGGGSGGGGSEVKLVESGGGLVKPGGSLKLSCAASGFTFSSYAMSWVRQIPEKRLEWVASISRGGTTYYPDSVKGRFTISRDNVRNILYLQMSSLRSEDTAMYYCGRYDYDGYYAMDYWGQGTSVTVSS

SEQ ID NO: 2526 - protein, 243 aa, Artificial Sequence
  Synthetic Polypeptide
DVVVTPVSCFLSCISGAEGHHLIQGQQKCQYIWLLYALEPTETRTATQTPHLSCIQPRIWGPCQVQWQWVWDRLHPQHPSCGGGGCCNLLLSAHGAYTFGGGTRLELKGGGGSGGGGSGGGGSEVKLQESGPELVKPGASVKMSCKASGYTFTSYVMHWVKQKPGQGLEWIGYINPYNDGTKYNEKFKGKATLTSDKSSSTAYMELSSLTSEDSAVYYCARWKIYYGNYEDYWGQGTPLTVSS

SEQ ID NO: 2527 - protein, 274 aa, Artificial Sequence
  Synthetic Polypeptide
DEFQVQLVQSGGGLVQPGGSLRLSCAASDFDFAAYEMSWVRQAPGQGLEWVAIISHDGIDKYYTDSVKGRFTISRDNSKNTLYLQMNTLRAEDTATYYCLRLGAVGQGTLVTVSSLEGGGGSGGGGSGGGGSGSGGSGSGGSGSGGSGSGGSFEQVQLVQSGGGLVQPGGSLRLSCAASDFAFDDYEMSWVRQAPGKALEWIGDINHSGTTIYNPSLKSRVTISRDNSKNTLYLQMNTLRAEDTAIYYCARPHYGDYSDAFDIWGQGTMVTVSS

SEQ ID NO: 2528 - protein, 249 aa, Artificial Sequence
  Synthetic Polypeptide
EIVMTQSPATLSVSPGERATLSCRASQSVSSNLAWYQQKPGQAPRLLIYGASTRATGIPARFSGSGSGTDFTLTISSLQSVDSAVYYCQQYNNWPPYTFGQGTKLEIKGGGGSGGGGSGGGGSQVQLLESGGGVVQPGRSLRLSCAASGFTFSFYGMHWVRQAPGKGLEWVAAISYDGSNKYYADSVKGRFTISRDNSKNTLYLQMNSLRAEDTAVYYCAKRPNQFYCSDGRCYSIDYWGQGTLVTVSS

SEQ ID NO: 2529 - protein, 245 aa, Artificial Sequence
  Synthetic Polypeptide
QSVLTQPPSASAGGTPGQRVTISCSGSSSNIGSNFVYWYQQLPGTAPKLLIYRNNQRPSGVPDRFSGSRSGTSASLAGLRSEDEADYYCAADSLGGHYVFGTGTKVLGGGGSGGGGSGGGGSQVQLVESGGGSVQPGRSLRLSCEASGFTFEAYAMHWVRQPPGKGLEWVSSINWNSGRIAYADSVKGRFTISRDNARNSLYLQMNSLRLEDTAFYYCAKDIRRFSTGGAEFEYWGQGTLVTVSS

SEQ ID NO: 2530 - protein, 240 aa, Artificial Sequence
  Synthetic Polypeptide
ENVLTQSPAIMSASPGEKVTMTCSASSSVSYMHWYQQKSSTSPKLWIYDTSKLASGVPGRFSGSGSGNSYSLTISSMEAEDVATYYCFQGSGYPLTFGAGTKLELKGGGGSGGGGSGGGGSQVQLKESGPGLVAPSQSLSITCTVSGFSLSSQGVYWVRQPPGKGLEWLGAIWAGGSTNYNSALMSRLSISKDNSKSQVFLKMNSLQTDDTAMYYCARVDGYRGYNMDYWGQGTSVTVSS

SEQ ID NO: 2531 - protein, 243 aa, Artificial Sequence
  Synthetic Polypeptide
DIQMTQSPSSLSASVGDRVTITCRASQSISSYLNWYQQKPGKAPKLLIYDASNLETGVPSRFSGSGSGTDFTFTISSLQPEDIATYYCQQYDNLPLTFGGGTKVDIKRGGGGSGGGGSGGGGSQVQLVESGGGVVQPGRSLRLSCAASGFTFSSYAMHWVRQAPGKGLEWVAVISYDGSNKYYADSVKGRFTISRDNSKNTLYLQMNSLRAEDTAVYYCARAHNSSSWSFDYWGQGTLVTVSS

SEQ ID NO: 2532 - protein, 252 aa, Artificial Sequence
  Synthetic Polypeptide
DVVMTQSPLSLPVSLGDQASISCRSSQRLVHSNGNTYLHWYLQKPGQSPKLLIYRVSNRFPGVPDRFSGSGSGTDFTLKISRVEAEDLGIYFCSQSTHVPYTFGGGTKLEIKRGGGGSGGGGSGGGGSEVRLQQSGPDLIKPGASVKMSCKASGYTFTGYVMHWVKQRPGQGLEWIGFINPYNDDIQSNERFRGKATLTSDKSSTTAYMELSSLTSEDSAVYYCARGAGYNFDGAYRFFDFWGQGTTLTVSS

SEQ ID NO: 2533 - protein, 243 aa, Artificial Sequence
  Synthetic Polypeptide
SYELTQPPSVSVSPGQTATISCSGDQLGGKYGHWYQKKPGQSPVLVLYQDRKRPAGIPERFSGSSSGNTITLTISGTQAVDEADYYCQAWDTNLGGVFGGGTKVTVLGQGGGGSGGGGSGGGGSQVQLVESGAEVKKPGASVKVSCKASGYTFTGYYMHWVRQAPGQGLEWMGRINPNSGGTNYAQKFQGRVTMTRDTSISTAYMELSRLRSDDTAVYYCASPRGRGSAFDIWGQGTLVTVSS

SEQ ID NO: 2534 - protein, 246 aa, Artificial Sequence
  Synthetic Polypeptide
NFMLTQPHSVSESPGKTVTISCTRSSGSIASKYVQWYQQRPGSSPTTVIYEDNQRPSGVPDRFSGSIDTSSNSASLTISGLRTEDEADYYCHSYDSNNHSVFGGGTKVTVLGQGGGGSGGGGSGGGGSEVQLVESGGGVVQPGGSLRLSCAASGFTFSSYAMSWVRQAPGKGLEWVSAISGSGGSTYYADSVKGRFSISRDNSKNTLYLQMNSLRAEDTAVYYCARTRSSGAFDIWGQGTLVTVSS

SEQ ID NO: 2535 - protein, 242 aa, Artificial Sequence
  Synthetic Polypeptide
DIQMNQSPSSLSASLGDTITITCHASQNINVWLSWYQQKPGNIPKLLIYKASNLHTGVPSRFSGSGSGTGFTITISSLQPEDIATYYCQQGQSYPWTFGGGTKLEIKRGGGGSGGGGSGGGGSEVQLQQSGPELVKPGASVKISCKASGYSFTGYFMNWVKQSHGKSLEYIGRFNPYNGETLYNQKFKGKATLTVDKSSSTVHMELLSVTSEDSAVYYCGRSGNDDAMDYWGQGTSVTVSSA

SEQ ID NO: 2536 - protein, 242 aa, Artificial Sequence
  Synthetic Polypeptide
DIQMTQSPSILSASVGDRVTITCRASQRFGDYLAWYQQKPGQAPKLLIYGASTLQSGVPSRFSGSGSGTEFTLTISGLQPEDFATYYCQQANSFPITFGKGTRLDIRRGGGGSGGGGSGGGGSQVQLVQSGAEVKKPGSSVKVSCKASGGTFSSYAISWVRQAPGQGLEWMGWINVGNGNAIYSQKFQGRVTITRDTSATTAYMELSSLRSEDTAVYYCARDGERAWDLDYWGQGTLVTVSS

SEQ ID NO: 2537 - protein, 247 aa, Artificial Sequence
  Synthetic Polypeptide
ETTLTQSPGTLSLSPGERATLSCRASQSVSSSYLAWYQQKPGQAPRLLIYGASSRATGIPDRFSGSGSGTDFTLTISRLEPEDFAVYYCQQYGSSPYTFGQGTKLEIKRGGGGSGGGGSGGGGSQVQLVQSGGGVVQPGRSLRLSCAASGFTFSSYAMHWVRQAPGKGLEWVAVISYDGSNKYYADSVKGRFTISRDNSKNTLYLQMNSLRAEDTAVYYCARELRFLEWSSDAFDIWGQGTMVTVSS

SEQ ID NO: 2538 - protein, 240 aa, Artificial Sequence
  Synthetic Polypeptide
DIQMTQSPSSLSASVGDRVTITCRASQGISSWLAWYQQKPEKAPKSLIYAASSLQSGVPSRFSGSGSGTDFTLTISSLQPEDFATYYCQQYNSYPYTFGQGTKLEIKGGGGSGGGGSGGGGSQVQLVQSGAEVRKPGSSVKVSCKASGGSFNNYPIFWVRQAPGQGFEWMGRIIPILGITAYAQKFQGRVTITADKSTSTAYMELNSLRSEDTAVYYCAGGDDLDAFDIWGQGTMVSVSS

SEQ ID NO: 2539 - protein, 243 aa, Artificial Sequence
  Synthetic Polypeptide
EIVLTQSPATLSLSPGERATLSCRASQSVRSYLAWYQQKPGQAPRLLIYDASNRATGIPARFSGSGSGTDFTLTISSLEPEDFAVYYCQQRSNWPPTFGQGTKVEIKGGGGSGGGGSGGGGSQLQVQESGPGLVKPSETLSLTCTVSGGSISNSYFSWGWIRQPPGKGLEWIGSFYYGEKTYYNPSLKSRATISIDTSKSQFSLKLSSVTAADTAVYYCPRGPTMIRGVIDSWGQGTLVTVSS

SEQ ID NO: 2540 - protein, 252 aa, Artificial Sequence
  Synthetic Polypeptide
DIVMTQTPLSLPVTPGEPASISCRSSRSLLDSDDGNTYLDWYLQKPGQSPQLLIYTLSYRASGVPDRFSGSGSGTDFTLKISRVEAEDVGVYYCMQRVEFPITFGQGTRLEIKRGGGGSGGGGSGGGGSQVQLVESGGGVVQPGRSLRLSCAASGFIFSRYGMHWVRQAPGKGLKWVAVIWYDGSNKLYADSVKGRFTISRDNSKNTLYLQMNSLRAEDTAVYYCARDYYDNSRHHWGFDYWGQGTLVTVSS

SEQ ID NO: 2541 - protein, 242 aa, Artificial Sequence
  Synthetic Polypeptide
EIQMTQSPSSMSASLGDTITITCQATQDIFKNLNWYQQKPGKPPSLLIYYATELAEGVPSRFSGSGSGSDYSLTISNLESEDFAAYYCLQFFEFPFTFGSGTKLEMKGGGGSGGGGSGGGGSQVQLQQSGAELVRPGTSVKVSCKASGYVFTNYWIEWIKQRPGQGLEWIGVMNPGSGETTYNEKFKGKATLTADKSSSTAYMQLSSLTSVDSAVYFCARDHDRDYYAMDYWGQGTSVTVSS

SEQ ID NO: 2542 - protein, 239 aa, Artificial Sequence
  Synthetic Polypeptide
DILLTQSPAILSVSPGERVSFSCRASQNIGTSIHWYQQRTNGSPRLLIKYASESVSGIPSRFSGSGSGTDFTLSINSVESEDIADYYCQHTNSWPTTFGGGTKLEIKRGGGGSGGGGSGGGGSQVQLQQSDAELVKPGASVKISCKASGYTFTDHAIHWVKQKPEQGLEWIGYFSPGNGDIKYNEKFKGKATLTADKSSSTAYMQLNSLTSEDSAVYFCKRSYGNYDYWGQGTTLTVSS

SEQ ID NO: 2543 - protein, 244 aa, Artificial Sequence
  Synthetic Polypeptide
DIVMTQSPDSLAVSLGERATINCKSSQSLLNSGDQKNYLTWYQQKPGQPPKLLIYWASTRESGVPDRFSGSGSGTDFTLTISSLQAEDVAVYYCQNDYSYPLTFGQGTKVEIKGGGGSGGGGSGGGGSQVQLVQSGAEVKKTGSSVKVSCKASGYTFTDHAIHVWRQAPGQALEWMGHFSPGNTDIKYNDKFKGRVTLTVDRSMSTAYMELSSLRSEDTAMYYCKTSTFFFDYWGQGTMVTVSS

SEQ ID NO: 2544 - protein, 243 aa, Artificial Sequence
  Synthetic Polypeptide
DIQMTQSPSSLSASVGDRVTITCKASQDVSIAVAWYQQKPGKAPKVLIYSASYRYTGVPDRFSGSGSGTDFTFTISSLQPEDIAVYYCQQHYITPLTFGGGTKVEIKGGGGSGGGGSGGGGSQIQLVQSGHEVKKPGASVKVSCKASGYTFTNYGMNWVRQAPGQGLEWMGWINTKTGEPTYAEEFKGRFVFSLETSASTAYLQISSLKAEDTAMYFCGRGGYGSSYWYFDVWGQGTTVTVSS

SEQ ID NO: 2545 - protein, 245 aa, Artificial Sequence
  Synthetic Polypeptide
DIVMTQSPDSLAVSLGERATINCRASKSVSTSGYSYMHWYQQKPGQPPKLLIYLASNLESGVPDRFSGSGSGTDFTLTISSLQAEDVAVYYCQHSRELPYTFGQGTKLEIKGGGGSGGGGSGGGGSQVQLQESGPGLVKPSETLSLTCTVSGGSISSYGVHWIRQPPGKGLEWIGVIWTSGVTDYNSALMGRVTISVDTSKNQFSLKLSSVTAADTAVYYCARDGDYDRYTMDYWGQGTLVTVSS

SEQ ID NO: 2546 - protein, 241 aa, Artificial Sequence
  Synthetic Polypeptide
QSVLTQPPSVSVSPGQTASITCSGDKLGDKYACWYQQKPGQSPVLVIYQDSKRPSGIPERFSGSNSGNTATLTISGTQAMDEADYYCQAWDSSTAVVFGGGTKLTVLGGGGSGGGGSGGGGSQVQLVQSGAEVKKPGQSLKISCKASGYSLTDNWIGWVRQKPGKGLEWMGIIYPGDSDTRYSPSFQGQVTISADKSINTAYLQWSSLKASDTAIYYCVGLDWNYNPLRYWGPGTLVTVSS

SEQ ID NO: 2547 - protein, 239 aa, Artificial Sequence
  Synthetic Polypeptide
DIVMTQSQKFMSTSVGDRVSIICKASQNVGTFVAWYQQKPGQSPKLLVYSASNRYTGVPDRFTGSGSGTDFTLTINNMQSEDLADYFCRQYSSYPYTFGGGTKLEIKGGGGSGGGGSGGGGSEVQLQQSGPELVKPGASMKISCKASGYSFSAYTMNWVKQSHGKNLEWIGLINPYNGGTNYNQEFEGKATLTVNKSSNTAFMELLSLTSDDSAVYYCARRDWDYFDYWGQGTTLTVSS

SEQ ID NO: 2548 - protein, 250 aa, Artificial Sequence
  Synthetic Polypeptide
AIQMTQSPSSLSASVGDRVTITCRASQSISNYLNWYQQKPGKAPKLLIYAASSLQSGVPSRFSGSGSGTDFTLTISSLQPEDFATYYCQQSYSSPSTTFGQGTKLEIKRGGGGSGGGGSGGGGSEVQLVESGGGLIQPGGSLRLSCAASGFTVSSNYMSWVRQAPGKGLEWVSVTYSGGSTSYADSVKGRFTISRDNSKNTLYLQMNSLRAEDTAVYYCARGGRYCSSISCYARSGCDYWGQGTLVTVSS

SEQ ID NO: 2549 - protein, 245 aa, Artificial Sequence
  Synthetic Polypeptide
DIQMTQSPSSLSASVGDRVTITCRASQSIGTSLHWYQQKPGKAPKLLIKFASRLQSGVPSRFSGSGSGTDFTLTISSLQPEDFATYYCQQSPGFPPTFGQGTKLEIKRGGGGSGGGGSGGGGSQVQLVESGGGLVKPGGSLRLSCAASGFSITTSGYYWTWIRQFPGKGLEWMGYIGYNSKTYYNPALKSRITISRDNAKNSLYLQMNSLRAEDTAVYYCARSLYGGYKDAFDSWGQGTLVTVSS

SEQ ID NO: 2550 - protein, 249 aa, Artificial Sequence
  Synthetic Polypeptide
EIVLTQSPLSLPVTPGEPASISCRSSQSLLHSIGYNYLDWYLQKPGQSPQLLIYLGSNRASGVPDRFSGSGSGTDFTLKISRVEAEDVGVYYCMQALQTPLTFGGGTKVEIKRGGGGSGGGGSGGGGSEVQLVESGGGVVQPGRSLRLSCAASGFTFRSYGMHWVRQAPGKGLEWVAVISYDGSNKYYTDSVNGRFTISRDNSKNTLYLQMNSLRAEDTAVYYCARGGGYYETSGPDYWGQGTLVTVSS

SEQ ID NO: 2551 - protein, 247 aa, Artificial Sequence
  Synthetic Polypeptide
DVVMTQSPLSLPVTPGEPASISCRSSQSLLHSIGYNYLHWFLQKPGQSPQLLIYLGSNRASGVPDRFSGSGSGTDFTLKISRVEAEDVGVYYCMQALQTPPTFGQGTRLEIKRGGGGSGGGGSGGGGSQLQLQESGPGLVKPSGTLSLTCAVSGGSISSSNWWSWVRQPPGKGLEWIGEIYHSGSTNYNPSLKSRVTISVDKSKNQFSLKLSSVTAADTAVYYCVGSPYGDYVLDYWGQGTLVTVSS

SEQ ID NO: 2552 - protein, 251 aa, Artificial Sequence
  Synthetic Polypeptide
DVVMTQSPLSLPVTPGEPASISCRSSQSLLHSNGHNYLDWYLQKPGQSPQLLIYLGSNRASGVPDRFSGSGSGTDFTLKISRVEAEDVGVYYCMQTLQTPLTFGPGTKVDIKRGGGGSGGGGSGGGGSEVQLVETGGGVVQPGRSLRLSCAASGFTFSSYGMHWVRQAPGKGLEWVAVISYDGSNKYYADSVKGRFTISRDNSKNTLYLQMNSLRAEDTAVYYCAKDRYGWGSSFGHFDYWGQGTLVTVSS

SEQ ID NO: 2553 - protein, 245 aa, Artificial Sequence
  Synthetic Polypeptide
EIVLTQSPGTLSLSLGERATLSCRASQSISSSFLAWYQQKPGQAPKLLIYAASTRATGIPDRFSGSGSGTDFTLTISRLEPEDFAVYYCQQYGRSLSFGGGTKVEVKGGGGSGGGGSGGGGSQVQLQQSGPGLVKPSQTLSLTCAISGDSVSGNSATWNWIRQSPSRGLEWLGRTYYRSKWNHDYAESVKSRITINPDTSKNQFSLQLNSVTPEDTAVYYCARGDSSSWYAFDYWGQGTLVTVSS

SEQ ID NO: 2554 - protein, 245 aa, Artificial Sequence
  Synthetic Polypeptide
QTVVTQPPSASGTPGQRVTISCSGSSSNIGSNYVYWYQQLPGTAPKLLIYRSNQRPSGVPDRFSGSKSGTSASLAISGPRSVDEADYYCAAWDDSLNGVVFGGGTKLTVLGGGGGSGGGGSGGGGSQVQLVQSGAEVKKPGSSVKVSCKASGGTFSSYAISWVRQAPGQGLEWMGGIIPIFGTANYAQKFQGRVTITADESTSTAYMELSSLRSEDTAVYYCARRIPPYYGMDVWGQGTTVTVSS

SEQ ID NO: 2555 - protein, 245 aa, Artificial Sequence
  Synthetic Polypeptide
QSVVTQPPSVSVAPGKTARITCGRNNIGSKSVHWYQQKPGQAPVLVVYDDSDRPSGIPERFSGSNSGNTATLTISRVEAGDEADYYCQVWDSSSDHVVFGGGTKLTVLGGGGGSGGGGSGGGGSEVQLVQSGGGVVRPGGSLRLSCAASGFTFDDYGMSWVRQAPGKGLEWVSGINWNGGSTGYADSVRGRFTISRDNAKNSLYLQMNSLRAEDTALYYCARERGYGYHDPHDYWGQGTLVTVSS

SEQ ID NO: 2556 - protein, 246 aa, Artificial Sequence
  Synthetic Polypeptide
QAVVTQPPSASGTPGQRVTISCSGSSSNIGSNTVNWYQQVPGTAPKLLIYSNNQRPSGVPDRFSGSKSGTSASLAISGLQSEDEADYYCAAWDDSLNGWVFGGGTKLTVLGGGGSGGGGSGGGGSQMQLVQSGAEVKEPGESLRISCKGSGYSFTNFWISWVRQMPGKGLEWMGRVDPGYSYSTYSPSFQGHVTISADKSTSTAYLQWNSLKASDTAMYYCARVQYSGYYDWFDPWGQGTLVTVSS

SEQ ID NO: 2557 - protein, 240 aa, Artificial Sequence
  Synthetic Polypeptide
DIQMTQSPSTLSASVGDRVTITCRASQNINKWLAWYQQRPGKAPQLLIYKASSLESGVPSRFSGSGSGTEYTLTISSLQPDDFATYYCQQYNSYATFGQGTKVEIKRGGGGSGGGGSGGGGSQVQLVQSGAEVKKPGESLKISCKGSGYNFSNKWIGWVRQLPGRGLEWIAIIYPGYSDITYSPSFQGRVTISADTSINTAYLHWHSLKASDTAMYYCVRHTALAGFDYWGLGTLVTVSS

SEQ ID NO: 2558 - protein, 242 aa, Artificial Sequence
  Synthetic Polypeptide
EIVLTQSPGTLSLSPGERATLSCRASQSVSNTYLAWYHQRPGQAPRLLIYGASSRATGIPDRFSGSGSGTDFALTISSLEPEDFAVYYCQQYSNSWTFGQGTKVEIKRGGGGSGGGGSGGGGSQVQLVESGGGVVQPGRSLRLSCAASGFTFSSYDMHWVRQAPGKGLEWVAVISYDGTNEYYADSVKGRFTISRDTSKNTLYLQMNSLRAEDTAVYYCARERYFDWSFDYWGQGTLVSVSS

SEQ ID NO: 2559 - protein, 241 aa, Artificial Sequence
  Synthetic Polypeptide
ELTQDPAVSVALGQTVRITCQGDSLRSNYANWYQQKPGQAPVLVIYGQNNRPSGIPDRFSGSSSGNTASLTITGAQAADEADYYCDSRVSTGNHVVFGGGTKLTVLGQGGGGSGGGGSGGGGSEVQLVQSGAEVKKPGASVKVSCKASGYTFTSYAMHWVRQAPGQRLEWMGWINAGNGNTKYSQKFQGRVTITRDTSASTAYMELSSLRSEDTAVYYCARDISYGSFDYWGQGTLVTVSS

SEQ ID NO: 2560 - protein, 243 aa, Artificial Sequence
  Synthetic Polypeptide
DIVLTQTPATLSVTPGDSVSLSCRASQSISNNLHWYQQKSHESPRLLIKNASQSISGIPSKFSGSGSGTDFTLRINSVETEDFGMYFCQQSNSWPYTFGSGTKLEIKGGGGSGGGGSGGGGSQVKLQQSGPELVKPGASVKISCKASGYSFTGYYMHWVKQSHGNILDWIGYIYPYNGVSSYNQKFKGKATLTVDKSSSTAYMELRSLTSEDSAVYYCARERGLYQLRAMDYWGQGTSVTVSS

SEQ ID NO: 2561 - protein, 234 aa, Artificial Sequence
  Synthetic Polypeptide
DIVMTQTPAIMSASPGQKVTITCSASSSVNYMHWYQQKLGSSPKLWIYDTSKLAPGVPARFSGSGSGTSYSLTISSMEAEDAASYFCHQWSSYPYTFGSGTKLEIKGGGGSGGGGSGGGGSEVQLQESGPDLVKPSQSLSLTCTVTGYSITSGYGWHWIRQFPGNKLEWMGYIHYSGSTTYNPSLKSRISISRDTSKNQFFLQLNSVTTEDTATYYCARSLRYWGQGTTLTVSS

SEQ ID NO: 2562 - protein, 237 aa, Artificial Sequence
  Synthetic Polypeptide
DIQMTQSPSSLSASVGDRVTITCSATSSISYMHWYQQKPGKAPKGWIYDTSKLAHGVPSRFSGSGSGTDFTLTISSLQPEDFATYYCHQRRSYPFTFGQGTKVEIKGGGGSGGGGSGGGGSEVQLVQSGAEVKKPGASVKVSCKASGYTFTNFWIHWVRQAPGQGLEWIGEIDPSDSYTNYNQKFKGRVTITRDTSTSTAYLELSSLRSEDTAVYYCAREITTVDYWGQGTLVTVSS

SEQ ID NO: 2563 - protein, 244 aa, Artificial Sequence
  Synthetic Polypeptide
DIQMTQSPSSLSASVGDRVTITCKASQGFNKYVAWYQQKPGKAPKLLIYYTSTLQPGVPSRFSGSGSGRDYTLTISSLQPEDFATYYCLQYGNLLYAFGQGTKVEIKRGGGGSGGGGSGGGGSEVQLVQSGAEVKKPGASVKVSCKASGYTFTSYWIGWVRQAPGQGLEWIGDIYPGGGYTNYNEKFKGRVTITRDTSTSTAYLELSSLRSEDTAVYYCARLDGSSYRGAMDSWGQGTLVTVSS

SEQ ID NO: 2564 - protein, 248 aa, Artificial Sequence
  Synthetic Polypeptide
DIQLTQSPSSLSASVGDRVTITCRASQSVDYDGDSYMNWYQQKPGKAPKLLIYAASYLESGVPSRFSGSGSGTDFTLTISSLQPEDFATYYCQQSHEDPYTFGQGTKVEIKRGGGGSGGGGSGGGGSEVQLVESGGGLVQPGGSLRLSCAVSGYSITSGYSWNWIRQAPGKGLEWVASITYDGSTNYNPSVKGRITISRDDSKNTFYLQMNSLRAEDTAVYYCARGSHYFGHWHFAVWGQGTLVTVSS

SEQ ID NO: 2565 - protein, 240 aa, Artificial Sequence
  Synthetic Polypeptide
DIQMTQSPSSLSASVGDRVTITCRASQDIRYYLNWYQQKPGKAPKLLIYVASSLQSGVPSRFSGSGSGTEFTLTVSSLQPEDFATYYCLQVYSTPRTFGQGTKVEIKGGGGSGGGGSGGGGSEVQLVESGGGLAKPGGSLRLSCAASGFRFTFNNYYMDWVRQAPGQGLEWVSRISSSGDPTWYADSVKGRFTISRENAKNTLFLQMNSLRAEDTAVYYCASLTTGSDSWGQGVLVTVSS

SEQ ID NO: 2566 - protein, 241 aa, Artificial Sequence
  Synthetic Polypeptide
EIVMTQSPATLSVSPGERATLSCRASQSVSRNLAWYQQKPGQAPRLLIYGASTRATGIPARFSGSGSGTEFTLTIGSLQSEDFAVYYCQQYKTWPRTFGQGTNVEIKGGGGSGGGGSGGGGSQVQLQQWGAGLLKPSETLSLTCAVFGGSFSGYYWSWIRQPPGKGLEWIGEINHRGNTNDNPSLKSRVTISVDTSKNQFALKLSSVTAADTAVYYCARERGYTYGNFDHWGQGTLVTVSS

SEQ ID NO: 2567 - protein, 242 aa, Artificial Sequence
  Synthetic Polypeptide
EIVMTPSSATLSVSPGERATLSCRASQSVSRNLAWYQQKPGQAPRLLIYGASTRATGIPARFSGSGSGTEFTLTISSLQSEDFAVYYCHQYSNWMCSFGQGTKLEIKGGGGSGGGGSGGGGSEVQLLESGGGLVQPGGSLRLSCAASGFTFSRYAMNWVRQAPGKGLEWVSGISGSGGRTYYADSVKGRFTISRDNSKNTLYLQMNSLRAEDTAVYYCAKDRDFWSGPFDYWGQGTLVTVSS

SEQ ID NO: 2568 - protein, 247 aa, Artificial Sequence
  Synthetic Polypeptide
DIQMTQSPSSLSASVGDRVTITCKASKNIRSYLAWYQQKPGKAPKLLIYSGSTLHSGVPSRFSGSGSGTDFTLTISSLQPEDFATYYCQQHHEYPLTFGQGTKVEIKRGGGGSGGGGSGGGGSQVQLQESGPGLVKPSETLSLTCTVSGYTITSGYDWSWIRQPPGKGLEWIGYINYGGSTNYKPSLGSRVTISVDTSKNQFSLKLSSVTAADTAVYYCARYNEYKSYIYDWYFDFWGQGTLVTVSS

SEQ ID NO: 2569 - protein, 10 aa, Artificial Sequence
  Synthetic Polypeptide
EQKLISEEDL

SEQ ID NO: 2570 - protein, 8 aa, Artificial Sequence
  Synthetic Polypeptide
DYKDDDDK

SEQ ID NO: 2571 - protein, 9 aa, Artificial Sequence
  Synthetic Polypeptide
SWKDASGWS

SEQ ID NO: 2572 - protein, 14 aa, Artificial Sequence
  Synthetic Polypeptide
GKPIPNPLLGLDST

SEQ ID NO: 2573 - protein, 9 aa, Artificial Sequence
  Synthetic Polypeptide
YPYDVPDYA

SEQ ID NO: 2574 - protein, 9 aa, Artificial Sequence
  Synthetic Polypeptide
HHHHHHGSG

SEQ ID NO: 2575 - protein, 15 aa, Artificial Sequence
  Synthetic Polypeptide
GLNDIFEAQKIEWHE

SEQ ID NO: 2576 - protein, 8 aa, Artificial Sequence
  Synthetic Polypeptide
WSHPQFEK

SEQ ID NO: 2577 - protein, 66 aa, Artificial Sequence
  Synthetic Polypeptide
GGSWSHPQFEKDYKDDDDKGSDYKDDDDKGSDYKDDDDKGSDYKDDDDKAWSHPQFEKHHHHHHHH

SEQ ID NO: 2578 - protein, 30 aa, Artificial Sequence
  Synthetic Polypeptide
DYKDDDDKDYKDDDDKVETDFYDYKDDDDK

SEQ ID NO: 2579 - protein, 52 aa, Artificial Sequence
  Synthetic Polypeptide
YPYDVPDYAWSHPQFEKYPYDVPDYAGYPYDVPDYAGYPYDVPDYHHHHHHH

SEQ ID NO: 2580 - protein, 168 aa, Artificial Sequence
  Synthetic Polypeptide
KPTENNEDFNIVAVASNFATTDLDADRGKLPGKKLPLEVLKEMEANARKAGCTRGCLICLSHIKCTPKMKKFIPGRCHTYEGDKESAQGGIGEAIVDIPEIPGFKDLEPMEQFIAQVDLCVDCTTGCLKGLANVQCSDLLKKWLPQRCATFASKIQGQVDKIKGAGGD

SEQ ID NO: 2581 - protein, 170 aa, Artificial Sequence
  Synthetic Polypeptide
VFTLEDFVGDWRQTAGYNLDQVLEQGGVSSLFQNLGVSVTPIQRIVLSGENGLKIDIHVIIPYEGLSGDQMGQIEKIFKVVYPVDDHHFKVILHYGTLVIDGVTPNMIDYFGRPYEGIAVFDGKKITVTGTLWNGNKIIDERLINPDGSLLFRVTINGVTGWRLCERILA

SEQ ID NO: 2582 - protein, 147 aa, Artificial Sequence
  Synthetic Polypeptide
EAEAERGKLPGKKLPLEVLIELEANARKAGCTRGCLICLSKIKCTAKMKKYIPGRCADYGGDKKTGQAGIVGAIVDIPEISGFKEMEPMEQFIAQVDRCADCTTGCLKGLANVKCSDLLKKWLPGRCATFADKIQSEVDNIKGLAGD

SEQ ID NO: 2583 - protein, 152 aa, Artificial Sequence
  Synthetic Polypeptide
NPTVNNDVNRGKMPGKKLPLEVLIELEANAFKAGCTRGCLICLSKIKCTAKMKQYIPGRCHDYGGDKKTGQAGIVGAIVDIPEISGFKEMEPLEQFIAQVDLCADCTTGCLKGLANVKCSELLKKWLPDRCASFADKIQKEAHNIKGLAGDR

SEQ ID NO: 2584 - protein, 205 aa, Artificial Sequence
  Synthetic Polypeptide
LPASPTDRSIVLDNGYVCSWEGIPDDLRDCPKTEDMSKQHGAALKLPPDVLDEMECNAKKSGCVRGCLQCLALIKCTAKMRKYIPGRCHSYEGDKDIAQGGIGKELTIDIPEIPGFLDLAPMDQFVAQVDLCVDCSSRCLKGLANVQCSCKLYKWLPTRCTGFQAKIKKEADTVIGLEDALALGFDTIQACVAAGKCKDTVGRYS

SEQ ID NO: 2585 - protein, 168 aa, Artificial Sequence
  Synthetic Polypeptide
AASEEADDDHVSLVKNYWRIGVGNERDVSLDRGGPPKLSKELLAEMHAIASNAGCSRVCLIGLSKIKCTPKMKTFLPGRCNTFAPKPATGDGPFAAAAAIPGFSDLTAMEQYKAQVAQCDCSNRCLVGLANIKCSAALKAALPQRCTTFATNIQKEGEVDSIKGYGRK

SEQ ID NO: 2586 - protein, 194 aa, Artificial Sequence
  Synthetic Polypeptide
QPTENKQESQIEDIDRSTSLGLMCYEQCTGQSGLDLKCYKECADFTGDRNRGRKLPGKKLPLEVLKIMEANARRAGCTRGCLICLSKIKCTAKMKQYIPGRCHTYEGDKSIGQGGIGGPIVDIPEIIGFQNMEPMEQFIAQVDLCADCTTGCLKGLANVRCNDLLKKWLPDRCAGFANKIQSEVDNIKGLAGDR

SEQ ID NO: 2587 - protein, 169 aa, Artificial Sequence
  Synthetic Polypeptide
KSIDSYENIDIVAVAGNFAAVDQDANRGGNLPGKKMPIEVLKEMEANAKRAGCVRGCLICLSHIKCTAKMKKFIPGRCHSYHGDADTKQGALEEVVDMPEIPGFVDMEPMEQFIAQVDKCEDCTTGCLKGLANVHCSDLLKKWLPQRCSQFADKIQSEVDTIKGLAGDR

SEQ ID NO: 2588 - protein, 192 aa, Artificial Sequence
  Synthetic Polypeptide
NPTENKDDIDIVGVEGKFGTTDLETDLFTIVEDMNVISRDTNLANSDADRGKMPGKKLPLEVLIEMEANARKAGCTRGCLICLSKIKCTAKMKVYIPGRCHDYGGDKKTGQAGIVGAIVDIPEISGFKELGPMEQFIAQVDLCADCTTGCLKGLANVKCSALLKKWLPDRCASFADKIQSEVDNIKGLAGDR

SEQ ID NO: 2589 - protein, 169 aa, Artificial Sequence
  Synthetic Polypeptide
KPTENNDDIDIVGIASTFITTNTDADRGKMPGKKLPLAVLKEMEANAAKAGCSRGCLICLSKIKCTAKMKQFIPGRCHDYGGDKKTGQAALVGAIFDIPEIFGFLDMEPIEQFIAQVDLCAGCTTGCLKGLANIKCSELLKKWLPKRCTSFAYKMQKEMHNIKGMAGDR

SEQ ID NO: 2590 - protein, 169 aa, Artificial Sequence
  Synthetic Polypeptide
KATENNDDIDIVGIASTFITTNTDADRGKMPGKRLPLAVLKEMEANAVKAGCSRGCLICLSKIKCTAKMKQYIPGRCHDYGGDKKTGQAAIEGAIDDIPEISGFKEMAPMEQFIAQVDLCADCTTGCLKGLANVKCSELLKKWLPKRCTSFATKMQKEIHNIKGMGGDR

SEQ ID NO: 2591 - protein, 195 aa, Artificial Sequence
  Synthetic Polypeptide
NPTETQDGVDILGVEGKFGTETNLETDLFTIWEINGIIKSDRDTNRANADADRGKMPGKKLPLAVLIEMEANAFKAGCTRGCLICLSKIKCTAKMKEYIPGRCHDYGGDKKTGQAGIVGAIVDIPEISGFKELGPMEQFIAQVDLCADCTTGCLKGLANVKCSALLKKWLPDRCASFADKIQSEVHNIKGLAGDR

SEQ ID NO: 2592 - protein, 173 aa, Artificial Sequence
  Synthetic Polypeptide
ATINENFEDIDLVAIGGSFATDVDANRGGHGGHPGKKMPKEVLLEMEANAKRAGCHRGCLICLSHIKCTQKMKKFIPGRCHSYAGDKDSAQGGITEEETVDMPEIAGFKDLEPMEQFIAQVDLCVDCTTGCLKGLANVHCSDLLKKWLPSRCKTFASKIQSQVDTIKGLAGDR

SEQ ID NO: 2593 - protein, 192 aa, Artificial Sequence
  Synthetic Polypeptide
NPTENNDHINIVGIEGKFGITDLETDLFTIWETNRMISTDNEQANTDSNRGKMPGKKLPLAVLIEMEANAFKAGCTRGCLICLSKIKCTAKMKKYIPGRCHDYGGDKKTGQAGIVGAIVDIPDISGFKEMGPMEQFIAQVDRCTDCTTGCLKGLANVKCSELLKKWLPDRCASFADKIQSEVHNIKGLAGDR

SEQ ID NO: 2594 - protein, 165 aa, Artificial Sequence
  Synthetic Polypeptide
QPTENKKESYTEDTDVNGDHDRGRKLPGKKLPLEVLKIMEANARRAGCTRGCLICLSKIKCTAKMKQYIPGRCHTYEGDKSIGQAGIGGPIIDIPEIIGFKNMEPMEQFIAQVDLCADCTTGCLKGLANVRCNDLLKKWLPDRCAGFALKIQGEVENIKGMAGDR

SEQ ID NO: 2595 - protein, 205 aa, Artificial Sequence; identical to SEQ ID NO: 2584
  Synthetic Polypeptide

SEQ ID NO: 2596 - protein, 177 aa, Artificial Sequence
  Synthetic Polypeptide
WAASEEADDDLVSLVKNYWGVGVSNERDVSLDRGGHGKLPKKLSVEILAEMEANAQKSNCSRGCLIGLSKIKCTPKMKKFLPGRCHEYSGDPKTGQGPLTAAAVIPGYSDLTAMEQFKLQVDKCDCSTQCLKGLANVKCSAALKAVLPTRCSQFATQIQAEVGTIKGKGKKPTPPIG

SEQ ID NO: 2597 - protein, 310 aa, Artificial Sequence
  Synthetic Polypeptide
ASKVYDPEQRKRMITGPQWWARCKQMNVLDSFINYYDSEKHAENAVIFLHGNAASSYLWRHVVPHIEPVARCIIPDLIGMGKSGKSGNGSYRLLDHYKYLTAWFELLNLPKKIIFVGHDWGACLAFHYSYEHQDKIKAIVHAESVVDVIESWDEWPDIEEDIALIKSEEGEKMVLENNFFVETMLPSKIMRKLEPEEFAAYLEPFKEKGEVRRPTLSWPREIPLVKGGKPDVVQIVRNYNAYLRASDDLPKMFIESDPGFFSNAIVEGAKKFPNTEFVKVKGLHFSQEDAPDEMGKYIKSFVERVLKNEQ

SEQ ID NO: 2598 - protein, 21 aa, Artificial Sequence
  Synthetic Polypeptide
VKQTLNFDLLKLAGDVESNPG

SEQ ID NO: 2599 - protein, 18 aa, Artificial Sequence
  Synthetic Polypeptide
EGRGSLLTCGDVEENPGP

SEQ ID NO: 2600 - protein, 19 aa, Artificial Sequence
  Synthetic Polypeptide
ATNFSLLKQAGDVEENPGP

SEQ ID NO: 2601 - protein, 19 aa, Artificial Sequence
  Synthetic Polypeptide
ATNFSLLKQAGDVEQNPGP

SEQ ID NO: 2602 - protein, 20 aa, Artificial Sequence
  Synthetic Polypeptide
QCTNYALLKLAGDVESNPGP

SEQ ID NO: 2603 - protein, 4 aa, Artificial Sequence
  Synthetic Polypeptide
SGSG

SEQ ID NO: 2604 - protein, 4 aa, Artificial Sequence
  Synthetic Polypeptide
RAKR

SEQ ID NO: 2605 - protein, 60 aa, Artificial Sequence
  Synthetic Polypeptide
AKPTTTPAPRPPTPAPTIASQPLSLRPEACRPAAGGAVHTRGLDFACDIYIWAPLAGTCG

SEQ ID NO: 2606 - protein, 60 aa, Artificial Sequence; identical to SEQ ID NO: 2605
  Synthetic Polypeptide

SEQ ID NO: 2607 - protein, 60 aa, Artificial Sequence; identical to SEQ ID NO: 2605
  Synthetic Polypeptide

SEQ ID NO: 2608 - protein, 42 aa, Artificial Sequence
  Synthetic Polypeptide
KRGRKKLLYIFKQPFMRPVQTTQEEDGCSCRFPEEEEGGCEL

SEQ ID NO: 2609 - protein, 60 aa, Artificial Sequence
  Synthetic Polypeptide
RVKFSRSADAPAYQQGQNQLYNELNLGRREEYDVLDKRRGRDPEMGGKPRRKNPQEGLYN

SEQ ID NO: 2610 - protein, 60 aa, Artificial Sequence; identical to SEQ ID NO: 2609
  Synthetic Polypeptide

SEQ ID NO: 2611 - protein, 60 aa, Artificial Sequence
  Synthetic Polypeptide
KIEVMYPPPYLDNEKSNGTIIHVKGKHLCPSPLFPGPSKPFWVLVVVGGVLACYSLLVTV

SEQ ID NO: 2612 - protein, 60 aa, Artificial Sequence
  Synthetic Polypeptide
KESSGGPDSPDTEPGSSAGPTQRPSDNSHNEHAPASQGLKAEHLYILIGVSVVFLFCLLL

SEQ ID NO: 2613 - protein, 199 aa, Artificial Sequence
  Synthetic Polypeptide
MTEYKPTVRLATRDDVPRAVRTLAAAFADYPATRHTVDPDRHIERVTELQELFLTRVGLDIGKVWVADDGAAVAVWTTPESVEAGAVFAEIGPRMAELSGSRLAAQQQMEGLLAPHRPKEPAWFLATVGVSPDHQGKGLGSAVVLPGVEAAERAGVPAFLETSAPRNLPFYERLGFTVTADVEVPEGPRTWCMTRKPGA

SEQ ID NO: 2614 - protein, 132 aa, Artificial Sequence
  Synthetic Polypeptide
MAKPLSQEESTLIERATATINSIPISEDYSVASAALSSDGRIFTGVNVYHFTGGPCAELVVLGTAAAAAAGNLTCIVAIGNENRGILSPCGRCRQVLLDLHPGIKAIVKDSDGQPTAVGIRELLPSGYVWEG

SEQ ID NO: 2615 - protein, 172 aa, Artificial Sequence
  Synthetic Polypeptide
MGNEASYPLEMCSHFDADEIKRLGKRFKKLDLDNSGSLSVEEFMSLPELQQNPLVQRVIDIFDTDGNGEVDFKEFIEGVSQFSVKGDKEQKLRFAFRIYDMDKDGYISNGELFQVLKMMVGNNTKLADTQLQQIVDKTIINADKDGDGRISFEEFCAVVGGLDIHKKMVVDV

SEQ ID NO: 2616 - protein, 357 aa, Artificial Sequence
  Synthetic Polypeptide
MLLLVTSLLLCELPHPAFLLIPRKVCNGIGIGEFKDSLSINATNIKHFKNCTSISGDLHILPVAFRGDSFTHTPPLDPQELDILKTVKEITGFLLIQAWPENRTDLHAFENLEIIRGRTKQHGQFSLAVVSLNITSLGLRSLKEISDGDVIISGNKNLCYANTINWKKLFGTSGQKTKIISNRGENSCKATGQVCHALCSPEGCWGPEPRDCVSCRNVSRGRECVDKCNLLEGEPREFVENSECIQCHPECLPQAMNITCTGRGPDNCIQCAHYIDGPHCVKTCPAGVMGENNTLVWKYADAGHVCHLCHPNCTYGCTGPGLEGCPTNGPKIPSIATGMVGALLLLLVVALGIGLFM

SEQ ID NO: 2617 - protein, 424 aa, Artificial Sequence
  Synthetic Polypeptide
MRPSGTAGAAFLALLAALCPASRALEEKKGNYVVTDHGSCVRACGADSYEMEEDGVRKCKKCEGPCRKVCNGIGIGEFKDSLSINATNIKHFKNCTSISGDLHILPVAFRGDSFTHTPPLDPQELDILKTVKEITGFLLIQAWPENRTDLHAFENLEIIRGRTKQHGQFSLAVVSLNITSLGLRSLKEISDGDVIISGNKNLCYANTINWKKLFGTSGQKTKIISNRGENSCKATGQVCHALCSPEGCWGPEPRDCVSCRNVSRGRECVDKCNLLEGEPREFVENSECIQCHPECLPQAMNITCTGRGPDNCIQCAHYIDGPHCVKTCPAGVMGENNTLVWKYADAGHVCHLCHPNCTYGCTGPGLEGCPTNGPKIPSIATGMVGALLLLLVVALGIGLFMRRRHIVRKRTLRRLLQERELVEP

SEQ ID NO: 2618 - protein, 333 aa, Artificial Sequence
  Synthetic Polypeptide
MPPPRLLFFLLFLTPMEVRPEEPLVVKVEEGDNAVLQCLKGTSDGPTQQLTWSRESPLKPFLKLSLGLPGLGIHMRPLAIWLFIFNVSQQMGGFYLCQPGPPSEKAWQPGWTVNVEGSGELFRWNVSDLGGLGCGLKNRSSEGPSSPSGKLMSPKLYVWAKDRPEIWEGEPPCLPPRDSLNQSLSQDLTMAPGSTLWLSCGVPPDSVSRGPLSWTHVHPKGPKSLLSLELKDDRPARDMWVMETGLLLPRATAQDAGKYYCHRGNLTMSFHLEITARPVLWHWLLRTGGWKVSAVTLAYLIFCLCSLVGILHLQRALVLRRKRKRMTDPTRRF

SEQ ID NO: 2619 - protein, 82 aa, Artificial Sequence
  Synthetic Polypeptide
MLQMAGQCSQNEYFDSLLHACIPCQLRCSSNTPPLTCQRYCNASVTNSVKGTNAILWTCLGLSLIISLAVFVLMFLLRKINS

SEQ ID NO: 2620 - protein, 109 aa, Artificial Sequence
  Synthetic Polypeptide
TRGVQVETISPGDGRTFPKRGQTCVVHYTGMLEDGKKVDSSRDRNKPFKFMLGKQEVIRGWEEGVAQMSVGQRAKLTISPDYAYGATGHPGIIPPHATLVFDVELLKLE

SEQ ID NO: 2621 - protein, 107 aa, Artificial Sequence
  Synthetic Polypeptide
GVQVETISPGDGRTFPKRGQTCVVHYTGMLEDGKKVDSSRDRNKPFKFMLGKQEVIRGWEEGVAQMSVGQRAKLTISPDYAYGATGHPGIIPPHATLVFDVELLKLG

SEQ ID NO: 2622 - protein, 217 aa, Artificial Sequence
  Synthetic Polypeptide
MGVQVETISPGDGRTFPKRGQTCVVHYTGMLEDGKKVDSSRDRNKPFKFMLGKQEVIRGWEEGVAQMSVGQRAKLTISPDYAYGATGHPGIIPPHATLVFDVELLKLGTRGVQVETISPGDGRTFPKRGQTCVVHYTGMLEDGKKVDSSRDRNKPFKFMLGKQEVIRGWEEGVAQMSVGQRAKLTISPDYAYGATGHPGIIPPHATLVFDVELLKLE

SEQ ID NO: 2623 - protein, 419 aa, Artificial Sequence
  Synthetic Polypeptide
MGSSKSKPKDPSQRGVQVETISPGDGRTFPKRGQTCVVHYTGMLEDGKKVDSSRDRNKPFKFMLGKQEVIRGWEEGVAQMSVGQRAKLTISPDYAYGATGHPGIIPPHATLVFDVELLKLGTRGVQVETISPGDGRTFPKRGQTCVVHYTGMLEDGKKVDSSRDRNKPFKFMLGKQEVIRGWEEGVAQMSVGQRAKLTISPDYAYGATGHPGIIPPHATLVFDVELLKLETSATYEVLCEVARKLGTDDREVVLFLLNVFIPQPTLAQLIGALRALKEEGRLTFPLLAECLFRAGRRDLLRDLLHLDPRFLERHLAGTMSYFSPYQLTVLHVDGELCARDIRSLIFLSKDTIGSRSTPQTFLHWVYCMENLDLLGPTDVDALMSMLRSLSRVDLQRQVQTLMGLHLSGPSHSQHYRHTP

SEQ ID NO: 2624 - protein, 14 aa, Artificial Sequence
  Synthetic Polypeptide
MGSSKSKPKDPSQR

SEQ ID NO: 2625 - protein, 463 aa, Artificial Sequence
  Synthetic Polypeptide
MGSSKSKPKDPSQRLNAAGGPGAGSAAPVSSTSSLPLAALNMRVRRRLSLFLNVRTQVAADWTALAEEMDFEYLEIRQLETQADPTGRLLDAWQGRPGASVGRLLDLLTKLGRDDVLLELGPSIEEDCQKYILKQQQEEAEKPLQVAAVDSSVPRTAELAGITTLDDPLGHMPERFDAFICYCPSDIVGKKPTNKAPHPKQEPQEINFPDDLPGSNTAAPVQETLHGCQPVTQEDGKESRISVQERQVGGVQVETISPGDGRTFPKRGQTCWHYTGMLEDGKKVDSSRDRNKPFKFMLGKQEVIRGWEEGVAQMSVGQRAKLTISPDYAYGATGHPGIIPPHATLVFDVELLKLEVGGVQVETISPGDGRTFPKRGQTCWHYTGMLEDGKKVDSSRDRNKPFKFMLGKQEVIRGWEEGVAQMSVGQRAKLTISPDYAYGATGHPGIIPPHATLVFDVELLKLE

SEQ ID NO: 2626 - protein, 540 aa, Artificial Sequence
  Synthetic Polypeptide
MCHQQLVISWFSLVFLASPLVAIWELKKDVYVVELDWYPDAPGEMVVLTCDTPEEDGITWTLDQSSEVLGSGKTLTIQVKEFGDAGQYTCHKGGEVLSHSLLLLHKKEDGIWSTDILKDQKEPKNKTFLRCEAKNYSGRFTCWWLTTISTDLTFSVKSSRGSSDPQGVTCGAATLSAERVRGDNKEYEYSVECQEDSACPAAEESLPIEVMVDAVHKLKYENYTSSFFIRDIIKPDPPKNLQLKPLKNSRQVEVSWEYPDTWSTPHSYFSLTFCVQVQGKSKREKKDRVFTDKTSATVICRKNASISVRAQDRYYSSSWSEWASVPCSGGGGSGGGGSGGGGSRNLPVATPDPGMFPCLHHSQNLLRAVSNMLQKARQTLEFYPCTSEEIDHEDITKDKTSTVEACLPLELTKNESCLNSRETSFITNGSCLASRKTSFMMALCLSSIYEDLKMYQVEFKTMNAKLLMDPKRQIFLDQNMLAVIDELMQALNFNSETVPQKSSLEEPDFYKTKIKLCILLHAFRIRAVTIDRVMSYLNAS

SEQ ID NO: 2627 - protein, 254 aa, Homo sapiens
MEYASDASLDPEAPWPPAPRARACRVLPWALVAGLLLLLLLAAACAVFLACPWAVSGARASPGSAASPRLREGPELSPDDPAGLLDLRQGMFAQLVAQNVLLIDGPLSWYSDPGLAGVSLTGGLSYKEDTKELVVAKAGVYYVFFQLELRRVVAGEGSGSVSLALHLQPLRSAAGAAALALTVDLPPASSEARNSAFGFQGRLLHLSAGQRLGVHLHTEARARHAWQLTQGATVLGLFRVTPEIPAGLPSPRSE

SEQ ID NO: 2628 - protein, 261 aa, Homo sapiens
MIETYNQTSPRSAATGLPISMKIFMYLLTVFLITQMIGSALFAVYLHRRLDKIEDERNLHEDFVFMKTIQRCNTGERSLSLLNCEEIKSQFEGFVKDIMLNKEETKKENSFEMQKGDQNPQIAAHVISEASSKTTSVLQWAEKGYYTMSNNLVTLENGKQLTVKRQGLYYIYAQVTFCSNREASSQAPFIASLCLKSPGRFERILLRAANTHSSAKPCGQQSIHLGGVFELQPGASVFVNVTDPSQVSHGTGFTSFGLLKL

SEQ ID NO: 2629 - protein, 188 aa, Kaposi's sarcoma-associated herpesvirus
MATYEVLCEVARKLGTDDREVVLFLLNVFIPQPTLAQLIGALRALKEEGRLTFPLLAECLFRAGRRDLLRDLLHLDPRFLERHLAGTMSYFSPYQLTVLHVDGELCARDIRSLIFLSKDTIGSRSTPQTFLHWVYCMENLDLLGPTDVDALMSMLRSLSRVDLQRQVQTLMGLHLSGPSHSQHYRHTP

SEQ ID NO: 2630 - protein, 241 aa, Molluscum contagiosum virus
MSDSKEVPSLPFLRHLLEELDSHEDSLLLFLCHDAAPGCTTVTQALCSLSQQRKLTLAALVEMLYVLQRMDLLKSRFGLSKEGAEQLLGTSFLTRYRKLMVCVGEELDSSELRALRLFACNLNPSLSTALSESSRFVELVLALENVGLVSPSSVSVLADMLRTLRRLDLCQQLVEYEQQEQARYRYCYAASPSLPVRTLRRGHGASEHEQLCMPVQESSDSPELLRTPVQESSSDSPEQTT

SEQ ID NO: 2631 - protein, 371 aa, Molluscum contagiosum virus
MAHEPIPFSFLRNLLAELDASEHEVLRFLCRDVAPASKTAEDALRALQRRRLLTLSSMAELLCALRRFDVLKVRFGMTRECAGRLLGHGFLSQYRLQVAAINNMVGSEDLRVMCLCAGKLLPPSCTPRCLVDLVSALEDAGAISPQDVSVLVTLLHAVCRYDLSVALSAVAHGHMTVGVGTPVQDEPMDVLEVDDAEPMEATPACDEIGVVKLAGAASAGAPLADGAFAACTSAGKGEDLATSDLTDSEPEDSVFAVADPVYADVDLSMFVRANATADSSMFVNADAGADSSLVNADAGADSSLVNADAGADSSLVNAVADANSSLMRTTSACTDSEPEDSAGPSCAGMALSMFGRAKSVSSLLLRTKASY

SEQ ID NO: 2632 - protein, 171 aa, Equine herpesvirus 2
MSHYSMIDTYFSLDEDETETYLYLCRDLLKNKGEFQCTRDAFKFLSDYACLSAANQMELLFRVGRLDLIRRIFGQTWTPDSCPRYYMPICSPFRCLMALVNDFLSDKEVEEMYFLCAPRLESHLEPGSKKSFLRLASLLEDLELLGGDKLTFLRHLLTTIGRADLVKNLQV

SEQ ID NO: 2633 - protein, 167 aa, Herpesvirus saimiri
MDLKTTVLHITDSFTDEEMYCLLFLINGCIPRSCNAVNISDLIIETLSKSTQWDICLMQCLYVLRKIGLLLNLFQVTKEAVKQSFFTQPQLETHVLTLVNVNNNLTAKDEKRLCFILDQFFPRNVAAPSVILCVFSNMLCEMHVLECLCQLKKCLKQIGRSDLAKTV

SEQ ID NO: 2634 - protein, 174 aa, Rhesus monkey rhadinovirus H26-95]
MFPHKRLVDLGRHLEADDREAVLWLFDRPASDDTPEGFANGLCPSTGEPGIPLPVLLEAVFLVGRLDLVSTFFLLDVGFIIERLRSSPSYFSPYKHLMLSIDRQLSERDVKNLVFLTGDQLGRRRNQSPTFFRWLSQMEKAALVSPSNYMVLSDLLQAVSRRDVAKVVAANAPG

SEQ ID NO: 2635 - protein, 181 aa, Bovine herpesvirus 4
MVTRDVLLAIETHLNQNEKTFVMYFLLDPYIPKECKDFLPTLENLHSKRKIRYPILIELMYILQRFDLLRSIFLLDHRFVKDHITSSHWKYISPYKQLIFSIGQNIDDEDLISIKFISMNYIGKSPSKIKNYLDWVRALEKVDMVGPDNLDLFETFFKQIHRMDIVKMIKNYRTRETLQIT

SEQ ID NO: 2636 - protein, 480 aa, Homo sapiens
MSAEVIHQVEEALDTDEKEMLLFLCRDVAIDVVPPNVRDLLDILRERGKLSVGDLAELLYRVRRFDLLKRILKMDRKAVETHLLRNPHLVSDYRVLMAEIGEDLDKSDVSSLIFLMKDYMGRGKISKEKSFLDLVVELEKLNLVAPDQLDLLEKCLKNIHRIDLKTKIQKYKQSVQGAGTSYRNVLQAAIQKSLKDPSNNFRLHNGRSKEQRLKEQLGAQQEPVKKSIQESEAFLPQSIPEERYKMKSKPLGICLIIDCIGNETELLRDTFTSLGYEVQKFLHLSMHGISQILGQFACMPEHRDYDSFVCVLVSRGGSQSVYGVDQTHSGLPLHHIRRMFMGDSCPYLAGKPKMFFIQNYVVSEGQLEDSSLLEVDGPAMKNVEFKAQKRGLCTVHREADFFWSLCTADMSLLEQSHSSPSLYLQCLSQKLRQERKRPLLDLHIELNGYMYDWNSRVSAKEKYYVWLQHTLRKKLILSYT

SEQ ID NO: 2637 - protein, 196 aa, Artificial Sequence
  Synthetic Polypeptide
MSAEVIHQVEEALDTDEKEMLLFLCRDVAIDVVPPNVRDLLDILRERGKLSVGDLAELLYRVRRFDLLKRILKMDRKAVETHLLRNPHLVSDYRVLMAEIGEDLDKSDVSSLIFLMKDYMGRGKISKEKSFLDLVVELEKLNLVAPDQLDLLEKCLKNIHRIDLKTKIQKYKQSVQGAGTSYRNVLQAAIQKSLKD

SEQ ID NO: 2638 - protein, 353 aa, Human T-cell lymphotropic virus type 1
MAHFPGFGQSLLFGYPVYVFGDCVQGDWCPISGGLCSARLHRHALLATCPEHQITWDPIDGRVIGSALQFLIPRLPSFPTQRTSKTLKVLTPPITHTTPNIPPSFLQAMRKYSPFRNGYMEPTLGQHLPTLSFPDPGLRPQNLYTLWGGSVVCMYLYQLSPPITWPLLPHVIFCHPGQLGAFLTNVPYKRIEELLYKISLTTGALIILPEDCLPTTLFQPARAPVTLTAWQNGLLPFHSTLTTPGLIWTFTDGTPMISGPCPKDGQPSLVLQSSSFIFHKFQTKAYHPSFLLSHGLIQYSSFHSLHLLFEEYTNIPISLLFNEKEADDNDHEPQISPGGLEPPSEKHFRETEV

SEQ ID NO: 2639 - protein, 356 aa, Human T-cell lymphotropic virus type 2
MAHFPGFGQSLLYGYPVYVFGDCVQADWCPVSGGLCSTRLHRHALLATCPEHQLTWDPIDGRVVSSPLQYLIPRLPSFPTQRTSRTLKVLTPPTTPVSPKVPPAFFQSMRKHTPYRNGCLEPTLGDQLPSLAFPEPGLRPQNIYTTWGKTVVCLYLYQLSPPMTWPLIPHVIFCHPRQLGAFLTKVPLKRLEELLYKMFLHTGAVIVLPEDDLPTTMFQPVRAPCIQTAWCTGLLPYHSILTTPGLIWTFNDGSPMISGPCPKAGQPSLVVQSSLLIFEKFQTKAFHPSYLLSHQLIQYSSFHNLHLLFDEYTNIPVSILFNKGEADDNGDQPPEPAAQGESSTQKVRPSHTNNPK

SEQ ID NO: 2640 - protein, 356 aa, Artificial Sequence
  Synthetic Polypeptide
MAHFPGFGQSLLYGYPVYVFGDCVQADWCPVSGGLCSTRLHRHALLATCPEHQLTWDPIDGRVVSSPLQYLIPRLPSFPTQRTSRTLKVLTPPTTPVSPKVPPAFFQSMRKHTPYRNGCLEPTLGDQLPSLAFPEPGLRPQNIYTTWGKTVVCLYLYQLSPPMTWPLIPHVIFCHPRQLGAFLTKVPLKRLEELLYKMFLHTGAVIVLPEDDLPTTMFQPVRAPCIQTAWCTGLLPYHSILTTPGLIWTFNDGSPMISGPCPKAGQPSLVVQSSLLIFEKFQTKAFHPSYLLSHQLIQYSSFHNLHLLFDEYTNIPVSRSFNKGEADDNGDQPPEPAAQGESSTQKVRPSHTNNPK

SEQ ID NO: 2641 - protein, 301 aa, Artificial Sequence
  Synthetic Polypeptide
MTRGVQVETISPGDGRTFPKRGQTCVVHYTGMLEDGKKVDSSRDRNKPFKFMLGKQEVIRGWEEGVAQMSVGQRAKLTISPDYAYGATGHPGIIPPHATLVFDVELLKLEGIHMATYEVLCEVARKLGTDDREVVLFLLNVFIPQPTLAQLIGALRALKEEGRLTFPLLAECLFRAGRRDLLRDLLHLDPRFLERHLAGTMSYFSPYQLTVLHVDGELCARDIRSLIFLSKDTIGSRSTPQTFLHWVYCMENLDLLGPTDVDALMSMLRSLSRVDLQRQVQTLMGLHLSGPSHSQHYRHTP

SEQ ID NO: 2642 - protein, 408 aa, Artificial Sequence
  Synthetic Polypeptide
MGVQVETISPGDGRTFPKRGQTCVVHYTGMLEDGKKVDSSRDRNKPFKFMLGKQEVIRGWEEGVAQMSVGQRAKLTISPDYAYGATGHPGIIPPHATLVFDVELLKLGTRGVQVETISPGDGRTFPKRGQTCVVHYTGMLEDGKKVDSSRDRNKPFKFMLGKQEVIRGWEEGVAQMSVGQRAKLTISPDYAYGATGHPGIIPPHATLVFDVELLKLEGIHMATYEVLCEVARKLGTDDREVVLFLLNVFIPQPTLAQLIGALRALKEEGRLTFPLLAECLFRAGRRDLLRDLLHLDPRFLERHLAGTMSYFSPYQLTVLHVDGELCARDIRSLIFLSKDTIGSRSTPQTFLHWVYCMENLDLLGPTDVDALMSMLRSLSRVDLQRQVQTLMGLHLSGPSHSQHYRHTP

SEQ ID NO: 2643 - protein, 419 aa, Artificial Sequence; identical to SEQ ID NO: 2623
  Synthetic Polypeptide

SEQ ID NO: 2644 - protein, 576 aa, Artificial Sequence
  Synthetic Polypeptide
MGVQVETISPGDGRTFPKRGQTCVVHYTGMLEDGKKVDSSRDRNKPFKFMLGKQEVIRGWEEGVAQMSVGQRAKLTISPDYAYGATGHPGIIPPHATLVFDVELLKLGTRGVQVETISPGDGRTFPKRGQTCVVHYTGMLEDGKKVDSSRDRNKPFKFMLGKQEVIRGWEEGVAQMSVGQRAKLTISPDYAYGATGHPGIIPPHATLVFDVELLKLEGIHMAHFPGFGQSLLYGYPVYVFGDCVQADWCPVSGGLCSTRLHRHALLATCPEHQLTWDPIDGRVVSSPLQYLIPRLPSFPTQRTSRTLKVLTPPTTPVSPKVPPAFFQSMRKHTPYRNGCLEPTLGDQLPSLAFPEPGLRPQNIYTTWGKTVVCLYLYQLSPPMTWPLIPHVIFCHPRQLGAFLTKVPLKRLEELLYKMFLHTGAVIVLPEDDLPTTMFQPVRAPCIQTAWCTGLLPYHSILTTPGLIWTFNDGSPMISGPCPKAGQPSLVVQSSLLIFEKFQTKAFHPSYLLSHQLIQYSSFHNLHLLFDEYTNIPVSRSFNKGEADDNGDQPPEPAAQGESSTQKVRPSHTNNPK

SEQ ID NO: 2645 - protein, 583 aa, Artificial Sequence
  Synthetic Polypeptide
MGVQVETISPGDGRTFPKRGQTCVVHYTGMLEDGKKVDSSRDRNKPFKFMLGKQEVIRGWEEGVAQMSVGQRAKLTISPDYAYGATGHPGIIPPHATLVFDVELLKLGTRGVQVETISPGDGRTFPKRGQTCVVHYTGMLEDGKKVDSSRDRNKPFKFMLGKQEVIRGWEEGVAQMSVGQRAKLTISPDYAYGATGHPGIIPPHATLVFDVELLKLEGIRAYKDDDDKAHFPGFGQSLLYGYPVYVFGDCVQADWCPVSGGLCSTRLHRHALLATCPEHQLTWDPIDGRVVSSPLQYLIPRLPSFPTQRTSRTLKVLTPPTTPVSPKVPPAFFQSMRKHTPYRNGCLEPTLGDQLPSLAFPEPGLRPQNIYTTWGKTVVCLYLYQLSPPMTWPLIPHVIFCHPRQLGAFLTKVPLKRLEELLYKMFLHTGAVIVLPEDDLPTTMFQPVRAPCIQTAWCTGLLPYHSILTTPGLIWTFNDGSPMISGPCPKAGQPSLVVQSSLLIFEKFQTKAFHPSYLLSHQLIQYSSFHNLHLLFDEYTNIPVSRSFNKGEADDNGDQPPEPAAQGESSTQKVRPSHTNNPK

SEQ ID NO: 2646 - protein, 400 aa, Artificial Sequence
  Synthetic Polypeptide
MLEGVQVETISPGDGRTFPKRGQTCVVHYTGMLEDGKKVDSSRDRNKPFKFMLGKQEVIRGWEEGVAQMSVGQRAKLTISPDYAYGATGHPGIIPPHATLVFDVELLKLESGGGSGVDGFGDVGALESLRGNADLAYILSMEPCGHCLIINNVNFCRESGLRTRTGSNIDCEKLRRRFSSLHFMVEVKGDLTAKKMVLALLELAQQDHGALDCCVVVILSHGCQASHLQFPGAVYGTDGCPVSVEKIVNIFNGTSCPSLGGKPKLFFIQACGGEQKDHGFEVASTSPEDESPGSNPEPDATPFQEGLRTFDQLDAISSLPTPSDIFVSYSTFPGFVSWRDPKSGSWYVETLDDIFEQWAHSEDLQSLLLRVANAVSVKGIYKQMPGCFNFLRKKLFFKTS

SEQ ID NO: 2647 - protein, 121 aa, Artificial Sequence [sequence omitted]

SEQ ID NO: 2648 - protein, 115 aa, Artificial Sequence [sequence omitted]

SEQ ID NO: 2649 - protein, 270 aa, Artificial Sequence
  Synthetic Polypeptide
MDWIWRILFLVGAATGAHSEVQLVESGGGLVQPGGSLRLSCAASGSVFKINVMAWYRQAPGKGRELVAGIISGGSTSYADSVKGRFTISRDNAKNTLYLQMNSLRPEDTAVYYCAFITTESDYDLGRRYWGQGTLVTVSSGGGGSGGGGSGGGGSEVQLVESGGGLVQPGNSLRLSCAASGFTFSSFGMSWVRQAPGKGLEWVSSISGSGSDTLYADSVKGRFTISRDNAKTTLYLQMNSLRPEDTAVYYCTIGGSLSRSSQGTLVTVSS

SEQ ID NO: 2650 - protein, 106 aa, Artificial Sequence
  Synthetic Polypeptide
EIVLTQSPATLSLSPGERATLSCSASISVSYMYWYQQKPGQAPRLLIYDMSNLASGIPARFSGSGSGTDFTLTISSLEPEDFAVYYCMQWSGYPYTFGGGTKVEIK

SEQ ID NO: 2651 - protein, 119 aa, Artificial Sequence
  Synthetic Polypeptide
EVQLVESGGGLVQPGGSLRLSCAASGFTFSPFAMSWVRQAPGKGLEWVAKISPGGSWTYYSDTVTGRFTISRDNAKNSLYLQMNSLRAEDTAVYYCARQLWGYYALDIWGQGTTVTVSS

SEQ ID NO: 2652 - protein, 246 aa, Artificial Sequence
  Synthetic Polypeptide
MALPVTALLLPLALLLHAARPEIVLTQSPATLSLSPGERATLSCRASQSVSSYLAWYQQKPGQAPRLLIYDASNRATGIPARFSGSGSGTDFTLTIEDFAVYYCQQSTFGQGTKVEIKGGGGSGGGGSGGGGSQVYLVESGGGVVQPGRSLRLSCAASGFTFSNYGMHWVRQAPGKGLEWVALIWYDGSNKYYADSVKGRFTISRDNSKNTLYLQMTSLRVEDTAVYYCASNVDHWGQGTLVTVSS

SEQ ID NO: 2653 - protein, 253 aa, Artificial Sequence
  Synthetic Polypeptide
MALPVTALLLPLALLLHAARPEIVLTQSPATLSLSPGERATLSCRASQSVSSYLAWYQQKPGQAPRLLIYDASNRATGIPARFSGSGSGTDFTLTISSLEPEDFAVYYCQQSSNWPRTFGQGTKVEIKGGGGSGGGGSGGGGSQVQLVESGGGWQPGRSLRLDCKASGITFSNSGMHWVRQAPGKGLEWVAVIYDGSKRYYADSVKGRFISRDNSKNTLFLQMNSLRAEDTAVYYCATNDDYWGQGTLVTVSS

SEQ ID NO: 2654 - protein, 263 aa, Artificial Sequence
  Synthetic Polypeptide
MALPVTALLLPLALLLHAARPEIVLTQSPGTLSLSPGERATLSCRASQSVGSSYLAWYQQKPGQAPRLLIYGAFSRATGIPDRFSGSGSGTDFTLTISRLEPEDFAVYYCQQYGSSPWTFGQGTKVEIKRGGGGSGGGGSGGGGSQVQLVESGGGVVQPGRSLRLSCAASGFTFSSYTMHWVRQAPGKGLEWVTFISYDGNNKYYADSVKGRFTISRDNSKNTLYLQMNSLRAEDTAIYYCARTGWLGPFDYWGQGTLVTVSS

SEQ ID NO: 2655 - protein, 376 aa, Artificial Sequence
  Synthetic Polypeptide
MALPVTALLLPLALLLHAARPEIVLTQSPATLSLSPGERATLSCRASQSVSSYLAWYQQKPGQAPRLLIYDASNRATGIPARFSGSGSGTDFTLTIEDFAVYYCQQSTFGQGTKVEIKGGGGSGGGGSGGGGSQVYLVESGGGVVQPGRSLRLSCAASGFTFSNYGMHWVRQAPGKGLEWVALIWYDGSNKYYADSVKGRFTISRDNSKNTLYLQMTSLRVEDTAVYYCASNVDHWGQGTLVTVSSGGGGSGGGGSGGGGSEVQLVESGGGLVQPGNSLRLSCAASGFTFSSFGMSWVRQAPGKGLEWVSSISGSGSDTLYADSVKGRFTISRDNAKTTLYLQMNSLRPEDTAVYYCTIGGSLSRSSQGTLVTVSS

SEQ ID NO: 2656 - protein, 383 aa, Artificial Sequence
  Synthetic Polypeptide
MALPVTALLLPLALLLHAARPEIVLTQSPATLSLSPGERATLSCRASQSVSSYLAWYQQKPGQAPRLLIYDASNRATGIPARFSGSGSGTDFTLTISSLEPEDFAVYYCQQSSNWPRTFGQGTKVEIKGGGGSGGGGSGGGGSQVQLVESGGGWQPGRSLRLDCKASGITFSNSGMHWVRQAPGKGLEWVAVIYDGSKRYYADSVKGRFISRDNSKNTLFLQMNSLRAEDTAVYYCATNDDYWGQGTLVTVSSGGGGSGGGGSGGGGSEVQLVESGGGLVQPGNSLRLSCAASGFTFSSFGMSWVRQAPGKGLEWVSSISGSGSDTLYADSVKGRFTISRDNAKTTLYLQMNSLRPEDTAVYYCTIGGSLSRSSQGTLVTVSS

SEQ ID NO: 2657 - protein, 393 aa, Artificial Sequence
  Synthetic Polypeptide
MALPVTALLLPLALLLHAARPEIVLTQSPGTLSLSPGERATLSCRASQSVGSSYLAWYQQKPGQAPRLLIYGAFSRATGIPDRFSGSGSGTDFTLTISRLEPEDFAVYYCQQYGSSPWTFGQGTKVEIKRGGGGSGGGGSGGGGSQVQLVESGGGVVQPGRSLRLSCAASGFTFSSYTMHWVRQAPGKGLEWVTFISYDGNNKYYADSVKGRFTISRDNSKNTLYLQMNSLRAEDTAIYYCARTGWLGPFDYWGQGTLVTVSSGGGGSGGGGSGGGGSEVQLVESGGGLVQPGNSLRLSCAASGFTFSSFGMSWVRQAPGKGLEWVSSISGSGSDTLYADSVKGRFTISRDNAKTTLYLQMNSLRPEDTAVYYCTIGGSLSRSSQGTLVTVSS

SEQ ID NO: 2658 - protein, 106 aa, Artificial Sequence; identical to SEQ ID NO: 2650
  Synthetic Polypeptide

SEQ ID NO: 2659 - protein, 119 aa, Artificial Sequence; identical to SEQ ID NO: 2651
  Synthetic Polypeptide

SEQ ID NO: 2660 - protein, 119 aa, Artificial Sequence; identical to SEQ ID NO: 1941
  Synthetic Polypeptide

SEQ ID NO: 2661 - protein, 107 aa, Artificial Sequence; identical to SEQ ID NO: 2182
  Synthetic Polypeptide

SEQ ID NO: 2662 - protein, 259 aa, Artificial Sequence
  Synthetic Polypeptide
MDWIWRILFLVGAATGAHSEIVLTQSPATLSLSPGERATLSCSASISVSYMYWYQQKPGQAPRLLIYDMSNLASGIPARFSGSGSGTDFTLTISSLEPEDFAVYYCMQWSGYPYTFGGGTKVEIKGGGGSGGGGSGGGGSEVQLVESGGGLVQPGGSLRLSCAASGFTFSPFAMSWVRQAPGKGLEWVAKISPGGSWTYYSDTVTGRFTISRDNAKNSLYLQMNSLRAEDTAVYYCARQLWGYYALDIWGQGTTVTVSS

SEQ ID NO: 2663 - protein, 47 aa, Artificial Sequence
  Synthetic Polypeptide
MDWIWRILFLVGAATGAHSGHRPLDKKREEAPSLRPAPPPISGGGYR

SEQ ID NO: 2664 - protein, 186 aa, Artificial Sequence
  Synthetic Polypeptide
MALPVTALLLPLALLLHAARPALPSCKEDEYPVGSECCPKCSPGYRVKEACGELTGTVCEPCPPGTYIAHLNGLSKCLQCQMCDPAMGLRASRNCSRTENAVCGCSPGHFCIVQDGDHCAACRAYATSSPGQRVQKGGTESQDTLCQNCPPGTFSPNGTLEECQHQTKCSWLVTKAGAGTSSSHWV

SEQ ID NO: 2665 - protein, 316 aa, Artificial Sequence
  Synthetic Polypeptide
MALPVTALLLPLALLLHAARPALPSCKEDEYPVGSECCPKCSPGYRVKEACGELTGTVCEPCPPGTYIAHLNGLSKCLQCQMCDPAMGLRASRNCSRTENAVCGCSPGHFCIVQDGDHCAACRAYATSSPGQRVQKGGTESQDTLCQNCPPGTFSPNGTLEECQHQTKCSWLVTKAGAGTSSSHWVGGGGSGGGGSGGGGSEVQLVESGGGLVQPGNSLRLSCAASGFTFSSFGMSWVRQAPGKGLEWVSSISGSGSDTLYADSVKGRFTISRDNAKTTLYLQMNSLRPEDTAVYYCTIGGSLSRSSQGTLVTVSS

SEQ ID NO: 2666 - protein, 1132 aa, Homo sapiens [sequence omitted]

SEQ ID NO: 2667 - protein, 543 aa, Homo sapiens
MLLRSKPALPPPLMLLLLGPLGPLSPGALPRPAQAQDVVDLDFFTQEPLHLVSPSFLSVTIDANLATDPRFLILLGSPKLRTLARGLSPAYLRFGGTKTDFLIFDPKKESTFEERSYWQSQVNQDICKYGSIPPDVEEKLRLEWPYQEQLLLREHYQKKFKNSTYSRSSVDVLYTFANCSGLDLIFGLNALLRTADLQWNSSNAQLLLDYCSSKGYNISWELGNEPNSFLKKADIFINGSQLGEDFIQLHKLLRKSTFKNAKLYGPDVGQPRRKTAKMLKSFLKAGGEVIDSVTWHHYYLNGRTATKEDFLNPDVLDIFISSVQKVFQVVESTRPGKKVWLGETSSAYGGGAPLLSDTFAAGFMWLDKLGLSARMGIEVVMRQVFFGAGNYHLVDENFDPLPDYWLSLLFKKLVGTKVLMASVQGSKRRKLRVYLHCTNTDNPRYKEGDLTLYAINLHNVTKYLRLPYPFSNKQVDKYLLRPLGPHGLLSKSVQLNGLTLKMVDDQTLPPLMEKPLRPGSSLGLPAFSYSFFVIRNAKVAACI

SEQ ID NO: 2668 - protein, 448 aa, Artificial Sequence
  Synthetic Polypeptide
MALPVTALLLPLALLLHAARPDIQMTQTTSSLSASLGDRVTISCRASQDISKYLNWYQQKPDGTVKLLIYHTSRLHSGVPSRFSGSGSGTDYSLTISNLEQEDIATYFCQQGNTLPYTFGGGTKLEITGGGGSGGGGSGGGGSEVKLQESGPGLVAPSQSLSVTCTVSGVSLPDYGVSWIRQPPRKGLEWLGVIWGSETTYYNSALKSRLTIIKDNSKSQVFLKMNSLQTDDTAIYYCAKHYYYGGSYAMDYWGQGTSVTVSSRVGGSGVFTLEDFVGDWRQTAGYNLDQVLEQGGVSSLFQNLGVSVTPIQRIVLSGENGLKIDIHVIIPYEGLSGDQMGQIEKIFKVVYPVDDHHFKVILHYGTLVIDGVTPNMIDYFGRPYEGIAVFDGKKITVTGTLWNGNKIIDERLINPDGSLLFRVTINGVTGWRLCERILASWKDASGWS

SEQ ID NO: 2669 - protein, 447 aa, Artificial Sequence
  Synthetic Polypeptide
MALPVTALLLPLALLLHAARPDDIQMTQSSSSFSVSLGDRVTITCMASEDIYIRLAWYQQKPGNAPRLLISAATSLETGVPSRFSGSGSGKDYTLSITSLQTEDVGTYYCQQYWSSPWTFGGGTKLEINGGGGSGGGGSGGGGSDVQLQESGPGLVKPSQSLSLTCTVTGYSITSDYTWNWIRQFPGNKLEWMGYITYSGSTSYNPSLKSRNSITRDTSKNQFFLQLNSVTTEDTATYYCARLGRRYTMDYWGQGTSVTVSSTRGGSGVFTLEDFVGDWRQTAGYNLDQVLEQGGVSSLFQNLGVSVTPIQRIVLSGENGLKIDIHVIIPYEGLSGDQMGQIEKIFKVVYPVDDHHFKVILHYGTLVIDGVTPNMIDYFGRPYEGIAVFDGKKITVTGTLWNGNKIIDERLINPDGSLLFRVTINGVTGWRLCERILASWKDASGWS

SEQ ID NO: 2670 - protein, 675 aa, Artificial Sequence
  Synthetic Polypeptide
MPSWALFMVTSCLLLAPQNLAQVSSQDVSLLASDSEPLKCFSRTFEDLTCFWDEEEAAPSGTYQLLYAYPREKPRACPLSSQSMPHFGTRYVCQFPDQEEVRLFFPLHLWVKNVFLNQTRTQRVLFVDSVGLPAPPSIIKAMGGSQPGELQISWEEPAPEISDFLRYELRYGPRDPKNSTGPTVIQLIATETCCPALQRPHSASALDQSPCAQPTMPWQDGPKQTSPSREASALTAEGGSCLISGLQPGNSYWLQLRSEPDGISLGGSWGSWSLPVTVDLPGDAVALGLQCFTLDLKNVTCQWQQQDHASSQGFFYHSRARCCPRDRYPIWENCEEEEKTNPGLQTPQFSRCHFKSRNDSIIHILVEVTTAPGTVHSYLGSPFWIHQAVRLPTPNLHWREISSGHLELEWQHPSSWAAQETCYQLRYTGEGHQDWKVLEPPLGARGGTLELRPRSRYRLQLRARLNGPTYQGPWSSWSDPTRVETATETATRGGSGVFTLEDFVGDWRQTAGYNLDQVLEQGGVSSLFQNLGVSVTPIQRIVLSGENGLKIDIHVIIPYEGLSGDQMGQIEKIFKVVYPVDDHHFKVILHYGTLVIDGVTPNMIDYFGRPYEGIAVFDGKKITVTGTLWNGNKIIDERLINPDGSLLFRVTINGVTGWRLCERILASWKDASGWS

SEQ ID NO: 2671 - protein, 483 aa, Artificial Sequence
  Synthetic Polypeptide
MPPPRLLFFLLFLTPMEVRPDYKDDDDKEEPLVVKVEEGDNAVLQCLKGTSDGPTQQLTWSRESPLKPFLKLSLGLPGLGIHMRPLAIWLFIFNVSQQMGGFYLCQPGPPSEKAWQPGWTVNVEGSGELFRWNVSDLGGLGCGLKNRSSEGPSSPSGKLMSPKLYVWAKDRPEIWEGEPPCLPPRDSLNQSLSQDLTMAPGSTLWLSCGVPPDSVSRGPLSWTHVHPKGPKSLLSLELKDDRPARDMWVMETGLLLPRATAQDAGKYYCHRGNLTMSFHLEITARPVLWHWLLRTGGWTRGGSGVFTLEDFVGDWRQTAGYNLDQVLEQGGVSSLFQNLGVSVTPIQRIVLSGENGLKIDIHVIIPYEGLSGDQMGQIEKIFKVVYPVDDHHFKVILHYGTLVIDGVTPNMIDYFGRPYEGIAVFDGKKITVTGTLWNGNKIIDERLINPDGSLLFRVTINGVTGWRLCERILASWKDASGWS

SEQ ID NO: 2672 - protein, 914 aa, Artificial Sequence
  Synthetic Polypeptide
MALPVTALLLPLALLLHAARPDIQMTQTTSSLSASLGDRVTISCRASQDISKYLNWYQQKPDGTVKLLIYHTSRLHSGVPSRFSGSGSGTDYSLTISNLEQEDIATYFCQQGNTLPYTFGGGTKLEITGGGGSGGGGSGGGGSEVKLQESGPGLVAPSQSLSVTCTVSGVSLPDYGVSWIRQPPRKGLEWLGVIWGSETTYYNSALKSRLTIIKDNSKSQVFLKMNSLQTDDTAIYYCAKHYYYGGSYAMDYWGQGTSVTVSSRVEQKLISEEDLAKPTTTPAPRPPTPAPTIASQPLSLRPEACRPAAGGAVHTRGLDFACDIYIWAPLAGTCGVLLLSLVITLYCGRARVKFSRSADAPAYQQGQNQLYNELNLGRREEYDVLDKRRGRDPEMGGKPRRKNPQEGLYNELQKDKMAEAYSEIGMKGERRRGKGHDGLYQGLSTATKDTYDALHMQALPPRSRGSGATNFSLLKQAGDVEENPGPGIHMATYEVLCEVARKLGTDDREVVLFLLNVFIPQPTLAQLIGALRALKEEGRLTFPLLAECLFRAGRRDLLRDLLHLDPRFLERHLAGTMSYFSPYQLTVLHVDGELCARDIRSLIFLSKDTIGSRSTPQTFLHWVYCMENLDLLGPTDVDALMSMLRSLSRVDLQRQVQTLMGLHLSGPSHSQHYRHTPLETDFYDYKDDDDKTSGSGEGRGSLLTCGDVEENPGPHMTEYKPTVRLATRDDVPRAVRTLAAAFADYPATRHTVDPDRHIERVTELQELFLTRVGLDIGKVWVADDGAAVAVWTTPESVEAGAVFAEIGPRMAELSGSRLAAQQQMEGLLAPHRPKEPAWFLATVGVSPDHQGKGLGSAVVLPGVEAAERAGVPAFLETSAPRNLPFYERLGFTVTADVEVPEGPRTWCMTRKPGA

SEQ ID NO: 2673 - protein, 914 aa, Artificial Sequence
  Synthetic Polypeptide
MALPVTALLLPLALLLHAARPEIVMTQSPATLSLSPGERATLSCRASQDISKYLNWYQQKPGQAPRLLIYHTSRLHSGIPARFSGSGSGTDYTLTISSLQPEDFAVYFCQQGNTLPYTFGQGTKLEIKGGGGSGGGGSGGGGSQVQLQESGPGLVKPSETLSLTCTVSGVSLPDYGVSWIRQPPGKGLEWIGVIWGSETTYYNSSLKSRVTISKDNSKNQVSLKLSSVTAADTAVYYCAKHYYYGGSYAMDYWGQGTLVTVSSTREQKLISEEDLAKPTTTPAPRPPTPAPTIASQPLSLRPEACRPAAGGAVHTRGLDFACDIYIWAPLAGTCGVLLLSLVITLYCGRARVKFSRSADAPAYQQGQNQLYNELNLGRREEYDVLDKRRGRDPEMGGKPRRKNPQEGLYNELQKDKMAEAYSEIGMKGERRRGKGHDGLYQGLSTATKDTYDALHMQALPPRSRGSGATNFSLLKQAGDVEENPGPGIHMATYEVLCEVARKLGTDDREVVLFLLNVFIPQPTLAQLIGALRALKEEGRLTFPLLAECLFRAGRRDLLRDLLHLDPRFLERHLAGTMSYFSPYQLTVLHVDGELCARDIRSLIFLSKDTIGSRSTPQTFLHWVYCMENLDLLGPTDVDALMSMLRSLSRVDLQRQVQTLMGLHLSGPSHSQHYRHTPLETDFYDYKDDDDKTSGSGEGRGSLLTCGDVEENPGPHMTEYKPTVRLATRDDVPRAVRTLAAAFADYPATRHTVDPDRHIERVTELQELFLTRVGLDIGKVWVADDGAAVAVWTTPESVEAGAVFAEIGPRMAELSGSRLAAQQQMEGLLAPHRPKEPAWFLATVGVSPDHQGKGLGSAVVLPGVEAAERAGVPAFLETSAPRNLPFYERLGFTVTADVEVPEGPRTWCMTRKPGA

SEQ ID NO: 2674 - protein, 914 aa, Artificial Sequence
  Synthetic Polypeptide
MALPVTALLLPLALLLHAARPEIVMTQSPATLSLSPGERATLSCRASQDISKYLNWYQQKPGQAPRLLIYHTSRLHSGIPARFSGSGSGTDYTLTISSLQPEDFAVYFCQQGNTLPYTFGQGTKLEIKGGGGSGGGGSGGGGSQVQLQESGPGLVKPSETLSLTCTVSGVSLPDYGVSWIRQPPGKGLEWIGVIWGSETTYYQSSLKSRVTISKDNSKNQVSLKLSSVTAADTAVYYCAKHYYYGGSYAMDYWGQGTLVTVSSTREQKLISEEDLAKPTTTPAPRPPTPAPTIASQPLSLRPEACRPAAGGAVHTRGLDFACDIYIWAPLAGTCGVLLLSLVITLYCGRARVKFSRSADAPAYQQGQNQLYNELNLGRREEYDVLDKRRGRDPEMGGKPRRKNPQEGLYNELQKDKMAEAYSEIGMKGERRRGKGHDGLYQGLSTATKDTYDALHMQALPPRSRGSGATNFSLLKQAGDVEENPGPGIHMATYEVLCEVARKLGTDDREVVLFLLNVFIPQPTLAQLIGALRALKEEGRLTFPLLAECLFRAGRRDLLRDLLHLDPRFLERHLAGTMSYFSPYQLTVLHVDGELCARDIRSLIFLSKDTIGSRSTPQTFLHWVYCMENLDLLGPTDVDALMSMLRSLSRVDLQRQVQTLMGLHLSGPSHSQHYRHTPLETDFYDYKDDDDKTSGSGEGRGSLLTCGDVEENPGPHMTEYKPTVRLATRDDVPRAVRTLAAAFADYPATRHTVDPDRHIERVTELQELFLTRVGLDIGKVWVADDGAAVAVWTTPESVEAGAVFAEIGPRMAELSGSRLAAQQQMEGLLAPHRPKEPAWFLATVGVSPDHQGKGLGSAVVLPGVEAAERAGVPAFLETSAPRNLPFYERLGFTVTADVEVPEGPRTWCMTRKPGA

SEQ ID NO: 2675 - protein, 915 aa, Artificial Sequence
  Synthetic Polypeptide
MALPVTALLLPLALLLHAARPDEIVLTQSPATLSLSPGERATLSCSASSSVSYMHWYQQKPGQAPRLLIYDTSKLASGIPARFSGSGSGTDFTLTISSLEPEDVAVYYCFQGSVYPFTFGQGTKLEIKRGGGGSGGGGSGGGGSQVQLQESGPGLVKPSQTLSLTCTVSGGSISTSGMGVGWIRQHPGKGLEWIGHIWWDDDKRYNPALKSRVTISVDTSKNQFSLKLSSVTAADTAVYYCARMELWSYYFDYWGQGTLVTVSSTREQKLISEEDLAKPTTTPAPRPPTPAPTIASQPLSLRPEACRPAAGGAVHTRGLDFACDIYIWAPLAGTCGVLLLSLVITLYCGRARVKFSRSADAPAYQQGQNQLYNELNLGRREEYDVLDKRRGRDPEMGGKPRRKNPQEGLYNELQKDKMAEAYSEIGMKGERRRGKGHDGLYQGLSTATKDTYDALHMQALPPRSRGSGATNFSLLKQAGDVEENPGPGIHMATYEVLCEVARKLGTDDREVVLFLLNVFIPQPTLAQLIGALRALKEEGRLTFPLLAECLFRAGRRDLLRDLLHLDPRFLERHLAGTMSYFSPYQLTVLHVDGELCARDIRSLIFLSKDTIGSRSTPQTFLHWVYCMENLDLLGPTDVDALMSMLRSLSRVDLQRQVQTLMGLHLSGPSHSQHYRHTPLETDFYDYKDDDDKTSGSGEGRGSLLTCGDVEENPGPHMTEYKPTVRLATRDDVPRAVRTLAAAFADYPATRHTVDPDRHIERVTELQELFLTRVGLDIGKVWVADDGAAVAVWTTPESVEAGAVFAEIGPRMAELSGSRLAAQQQMEGLLAPHRPKEPAWFLATVGVSPDHQGKGLGSAVVLPGVEAAERAGVPAFLETSAPRNLPFYERLGFTVTADVEVPEGPRTWCMTRKPGA

SEQ ID NO: 2676 - protein, 922 aa, Artificial Sequence
  Synthetic Polypeptide
MALPVTALLLPLALLLHAARPDIQLTQSPASLAVSLGQRATISCKASQSVDYDGDSYLNWYQQIPGQPPKLLIYDASNLVSGIPPRFSGSGSGTDFTLNIHPVEKVDAATYHCQQSTEDPWTFGGGTKLEIKGGGGSGGGGSGGGGSQVQLQQSGAELVRPGSSVKISCKASGYAFSSYWMNWVKQRPGQGLEWIGQIWPGDGDTNYNGKFKGKATLTADESSSTAYMQLSSLASEDSAVYFCARRETTTVGRYYYAMDYWGQGTTVTVSSTREQKLISEEDLAKPTTTPAPRPPTPAPTIASQPLSLRPEACRPAAGGAVHTRGLDFACDIYIWAPLAGTCGVLLLSLVITLYCGRARVKFSRSADAPAYQQGQNQLYNELNLGRREEYDVLDKRRGRDPEMGGKPRRKNPQEGLYNELQKDKMAEAYSEIGMKGERRRGKGHDGLYQGLSTATKDTYDALHMQALPPRSRGSGATNFSLLKQAGDVEENPGPGIHMATYEVLCEVARKLGTDDREVVLFLLNVFIPQPTLAQLIGALRALKEEGRLTFPLLAECLFRAGRRDLLRDLLHLDPRFLERHLAGTMSYFSPYQLTVLHVDGELCARDIRSLIFLSKDTIGSRSTPQTFLHWVYCMENLDLLGPTDVDALMSMLRSLSRVDLQRQVQTLMGLHLSGPSHSQHYRHTPLETDFYDYKDDDDKTSGSGEGRGSLLTCGDVEENPGPHMTEYKPTVRLATRDDVPRAVRTLAAAFADYPATRHTVDPDRHIERVTELQELFLTRVGLDIGKVWVADDGAAVAVWTTPESVEAGAVFAEIGPRMAELSGSRLAAQQQMEGLLAPHRPKEPAWFLATVGVSPDHQGKGLGSAVVLPGVEAAERAGVPAFLETSAPRNLPFYERLGFTVTADVEVPEGPRTWCMTRKPGA

SEQ ID NO: 2677 - protein, 921 aa, Artificial Sequence
  Synthetic Polypeptide
MALPVTALLLPLALLLHAARPDIVMTQAAPSIPVTPGESVSISCRSSKSLLNSNGNTYLYWFLQRPGQSPQLLIYRMSNLASGVPDRFSGSGSGTAFTLRISRVEAEDVGVYYCMQHLEYPFTFGAGTKLELKRGGGGSGGGGSGGGGSEVQLQQSGPELIKPGASVKMSCKASGYTFTSYVMHWVKQKPGQGLEWIGYINPYNDGTKYNEKFKGKATLTSDKSSSTAYMELSSLTSEDSAVYYCARGTYYYGSRVFDYWGQGTTLTVSSTREQKLISEEDLAKPTTTPAPRPPTPAPTIASQPLSLRPEACRPAAGGAVHTRGLDFACDIYIWAPLAGTCGVLLLSLVITLYCGRARVKFSRSADAPAYQQGQNQLYNELNLGRREEYDVLDKRRGRDPEMGGKPRRKNPQEGLYNELQKDKMAEAYSEIGMKGERRRGKGHDGLYQGLSTATKDTYDALHMQALPPRSRGSGATNFSLLKQAGDVEENPGPGIHMATYEVLCEVARKLGTDDREVVLFLLNVFIPQPTLAQLIGALRALKEEGRLTFPLLAECLFRAGRRDLLRDLLHLDPRFLERHLAGTMSYFSPYQLTVLHVDGELCARDIRSLIFLSKDTIGSRSTPQTFLHWVYCMENLDLLGPTDVDALMSMLRSLSRVDLQRQVQTLMGLHLSGPSHSQHYRHTPLETDFYDYKDDDDKTSGSGEGRGSLLTCGDVEENPGPHMTEYKPTVRLATRDDVPRAVRTLAAAFADYPATRHTVDPDRHIERVTELQELFLTRVGLDIGKVWVADDGAAVAVWTTPESVEAGAVFAEIGPRMAELSGSRLAAQQQMEGLLAPHRPKEPAWFLATVGVSPDHQGKGLGSAVVLPGVEAAERAGVPAFLETSAPRNLPFYERLGFTVTADVEVPEGPRTWCMTRKPGA

SEQ ID NO: 2678 - protein, 919 aa, Artificial Sequence
  Synthetic Polypeptide
MALPVTALLLPLALLLHAARPEIVLTQSPDFQSVTPKEKVTITCRASESVDTFGISFMNWFQQKPDQSPKLLIHAASNQGSGVPSRFSGSGSGTDFTLTINSLEAEDAATYYCQQSKEVPFTFGGGTKVEIKGGGGSGGGGSGGGGSEVQLVESGGGLVQPGGSLRLSCAASGFTFSSSWMNWVRQAPGKGLEWVGRIYPGDGDTNYNGKFKGRFTISRDDSKNSLYLQMNSLKTEDTAVYYCARSGFITTVLDFDYWGQGTLVTVSSTREQKLISEEDLAKPTTTPAPRPPTPAPTIASQPLSLRPEACRPAAGGAVHTRGLDFACDIYIWAPLAGTCGVLLLSLVITLYCGRARVKFSRSADAPAYQQGQNQLYNELNLGRREEYDVLDKRRGRDPEMGGKPRRKNPQEGLYNELQKDKMAEAYSEIGMKGERRRGKGHDGLYQGLSTATKDTYDALHMQALPPRSRGSGATNFSLLKQAGDVEENPGPGIHMATYEVLCEVARKLGTDDREVVLFLLNVFIPQPTLAQLIGALRALKEEGRLTFPLLAECLFRAGRRDLLRDLLHLDPRFLERHLAGTMSYFSPYQLTVLHVDGELCARDIRSLIFLSKDTIGSRSTPQTFLHWVYCMENLDLLGPTDVDALMSMLRSLSRVDLQRQVQTLMGLHLSGPSHSQHYRHTPLETDFYDYKDDDDKTSGSGEGRGSLLTCGDVEENPGPHMTEYKPTVRLATRDDVPRAVRTLAAAFADYPATRHTVDPDRHIERVTELQELFLTRVGLDIGKVWVADDGAAVAVWTTPESVEAGAVFAEIGPRMAELSGSRLAAQQQMEGLLAPHRPKEPAWFLATVGVSPDHQGKGLGSAVVLPGVEAAERAGVPAFLETSAPRNLPFYERLGFTVTADVEVPEGPRTWCMTRKPGA

SEQ ID NO: 2679 - protein, 915 aa, Artificial Sequence
  Synthetic Polypeptide
MALPVTALLLPLALLLHAARPAIQLTQSPSSLSASVGDRVTITCRASQGISSAQQKPGKAPKLLILAWYSSLESGVPSRFSGYDASGSGTDFTLTISSLQPEDFATYYCQQFNSYPYTFGQGTKLEIKGGGGSGGGGSGGGGSEVQLVQSGAEVKKPGESLKISCKGSGYSFSSSWIGWVRQMPGKGLEWMGIIYPDDSDTRYSPSFQGQVTISADKSIRTAYLQWSSLKASDTAMYYCARHVTMIWGVIIDFWGQGTLVTVSSTREQKLISEEDLAKPTTTPAPRPPTPAPTIASQPLSLRPEACRPAAGGAVHTRGLDFACDIYIWAPLAGTCGVLLLSLVITLYCGRARVKFSRSADAPAYQQGQNQLYNELNLGRREEYDVLDKRRGRDPEMGGKPRRKNPQEGLYNELQKDKMAEAYSEIGMKGERRRGKGHDGLYQGLSTATKDTYDALHMQALPPRSRGSGATNFSLLKQAGDVEENPGPGIHMATYEVLCEVARKLGTDDREVVLFLLNVFIPQPTLAQLIGALRALKEEGRLTFPLLAECLFRAGRRDLLRDLLHLDPRFLERHLAGTMSYFSPYQLTVLHVDGELCARDIRSLIFLSKDTIGSRSTPQTFLHWVYCMENLDLLGPTDVDALMSMLRSLSRVDLQRQVQTLMGLHLSGPSHSQHYRHTPLETDFYDYKDDDDKTSGSGEGRGSLLTCGDVEENPGPHMTEYKPTVRLATRDDVPRAVRTLAAAFADYPATRHTVDPDRHIERVTELQELFLTRVGLDIGKVWVADDGAAVAVWTTPESVEAGAVFAEIGPRMAELSGSRLAAQQQMEGLLAPHRPKEPAWFLATVGVSPDHQGKGLGSAVVLPGVEAAERAGVPAFLETSAPRNLPFYERLGFTVTADVEVPEGPRTWCMTRKPGA

SEQ ID NO: 2680 - protein, 939 aa, Artificial Sequence
  Synthetic Polypeptide
MALPVTALLLPLALLLHAARPINIYNAEPANPSEKNSPEFDIVMTQSPATLSLSPGERATLSCRSSKSLQNVNGNTYLYWFQQKPGQSPQLLIYRMSNLNSGVPDRFSGSGSGTEFTLTISSLEPEDFAVYYCMQHLEYPITFGAGTKLEIKGGGGSGGGGSGGGGSEVQLVESGGGLVKPGGSLKLSCAASGYTFTSYVMHWVRQAPGKGLEWIGYINPYNDGTKYNEKFQGRVTISSDKSISTAYMELSSLRSEDTAMYYCARGTYYYGTRVFDYWGQGTLVTVSSTREQKLISEEDLAKPTTTPAPRPPTPAPTIASQPLSLRPEACRPAAGGAVHTRGLDFACDIYIWAPLAGTCGVLLLSLVITLYCGRARVKFSRSADAPAYQQGQNQLYNELNLGRREEYDVLDKRRGRDPEMGGKPRRKNPQEGLYNELQKDKMAEAYSEIGMKGERRRGKGHDGLYQGLSTATKDTYDALHMQALPPRSRGSGATNFSLLKQAGDVEENPGPGIHMATYEVLCEVARKLGTDDREVVLFLLNVFIPQPTLAQLIGALRALKEEGRLTFPLLAECLFRAGRRDLLRDLLHLDPRFLERHLAGTMSYFSPYQLTVLHVDGELCARDIRSLIFLSKDTIGSRSTPQTFLHWVYCMENLDLLGPTDVDALMSMLRSLSRVDLQRQVQTLMGLHLSGPSHSQHYRHTPLETDFYDYKDDDDKTSGSGEGRGSLLTCGDVEENPGPHMTEYKPTVRLATRDDVPRAVRTLAAAFADYPATRHTVDPDRHIERVTELQELFLTRVGLDIGKVWVADDGAAVAVWTTPESVEAGAVFAEIGPRMAELSGSRLAAQQQMEGLLAPHRPKEPAWFLATVGVSPDHQGKGLGSAVVLPGVEAAERAGVPAFLETSAPRNLPFYERLGFTVTADVEVPEGPRTWCMTRKPGA

SEQ ID NO: 2681 - protein, 921 aa, Artificial Sequence
  Synthetic Polypeptide
MALPVTALLLPLALLLHAARPDILLTQSPATLSLSPGERATLSCRASQSVDYDGDSYLNWYQQKPGQPPKLLIYDASNLVSGIPPRFSGSGSGTDFTLTISRLEPEDFAVYHCQQSTEDPWTFGGGTKLEIKGGGGSGGGGSGGGGSQVQLVESGGGLVEPGGSLRLSCMSGYAFSSYWMNWVRQMPGKGLEWMGQIWPGDGDTNYNPSLKSRVTITADESTSTAYMELSSLKAEDTAVYFCARRETTTVGRYYYAMDYWGQGTLVTVSSTREQKLISEEDLAKPTTTPAPRPPTPAPTIASQPLSLRPEACRPAAGGAVHTRGLDFACDIYIWAPLAGTCGVLLLSLVITLYCGRARVKFSRSADAPAYQQGQNQLYNELNLGRREEYDVLDKRRGRDPEMGGKPRRKNPQEGLYNELQKDKMAEAYSEIGMKGERRRGKGHDGLYQGLSTATKDTYDALHMQALPPRSRGSGATNFSLLKQAGDVEENPGPGIHMATYEVLCEVARKLGTDDREVVLFLLNVFIPQPTLAQLIGALRALKEEGRLTFPLLAECLFRAGRRDLLRDLLHLDPRFLERHLAGTMSYFSPYQLTVLHVDGELCARDIRSLIFLSKDTIGSRSTPQTFLHWVYCMENLDLLGPTDVDALMSMLRSLSRVDLQRQVQTLMGLHLSGPSHSQHYRHTPLETDFYDYKDDDDKTSGSGEGRGSLLTCGDVEENPGPHMTEYKPTVRLATRDDVPRAVRTLAAAFADYPATRHTVDPDRHIERVTELQELFLTRVGLDIGKVWVADDGAAVAVWTTPESVEAGAVFAEIGPRMAELSGSRLAAQQQMEGLLAPHRPKEPAWFLATVGVSPDHQGKGLGSAVVLPGVEAAERAGVPAFLETSAPRNLPFYERLGFTVTADVEVPEGPRTWCMTRKPGA

SEQ ID NO: 2682 - protein, 918 aa, Artificial Sequence
  Synthetic Polypeptide
MALPVTALLLPLALLLHAARPDILLTQSPATLSLSPGERATLSCRASQSVDNYGISFMNWYQQKPGQPPKLLIYAASNQGSGIPSRFSGSGSGTDFTLTISSLEPEDFAMYFCQQSNEVPRTFGGGTKLEIKGGGGSGGGGSGGGGSQVQLVESGGGLVEPGGSLRLSCMSGYAFSSSWMNWVRQMPGKGLEWMGRIYPGDGDTNYNGKFKERVTITADESTSTAYMELSSLKAEDTAVYFCARSEYWGNYWAMDYWGQGTLVTVSSTREQKLISEEDLAKPTTTPAPRPPTPAPTIASQPLSLRPEACRPAAGGAVHTRGLDFACDIYIWAPLAGTCGVLLLSLVITLYCGRARVKFSRSADAPAYQQGQNQLYNELNLGRREEYDVLDKRRGRDPEMGGKPRRKNPQEGLYNELQKDKMAEAYSEIGMKGERRRGKGHDGLYQGLSTATKDTYDALHMQALPPRSRGSGATNFSLLKQAGDVEENPGPGIHMATYEVLCEVARKLGTDDREVVLFLLNVFIPQPTLAQLIGALRALKEEGRLTFPLLAECLFRAGRRDLLRDLLHLDPRFLERHLAGTMSYFSPYQLTVLHVDGELCARDIRSLIFLSKDTIGSRSTPQTFLHWVYCMENLDLLGPTDVDALMSMLRSLSRVDLQRQVQTLMGLHLSGPSHSQHYRHTPLETDFYDYKDDDDKTSGSGEGRGSLLTCGDVEENPGPHMTEYKPTVRLATRDDVPRAVRTLAAAFADYPATRHTVDPDRHIERVTELQELFLTRVGLDIGKVWVADDGAAVAVWTTPESVEAGAVFAEIGPRMAELSGSRLAAQQQMEGLLAPHRPKEPAWFLATVGVSPDHQGKGLGSAVVLPGVEAAERAGVPAFLETSAPRNLPFYERLGFTVTADVEVPEGPRTWCMTRKPGA

SEQ ID NO: 2683 - protein, 917 aa, Artificial Sequence
  Synthetic Polypeptide
MALPVTALLLPLALLLHAARPDILLTQSPATLSLSPGERATLSCKASQNVGTNVAWYQQKPGQPPKLLIYSATYRNSGIPARFSGSGSGTEFTLTITNVQSKDLADYFYFCQYNRYPYTSGGGTKLEIKRGGGGSGGGGSGGGGSQVQLVESGGGLVEPGGSLRLSCMSGYAFSSYWMNWVRQMPGKGLEWMGQIYPGDGDTNYNGKFKGRVTITADESTSTAYMELSSLKAEDTAVYFCARKTISSVVDFYFDNWGQGTLVTVSSTREQKLISEEDLAKPTTTPAPRPPTPAPTIASQPLSLRPEACRPAAGGAVHTRGLDFACDIYIWAPLAGTCGVLLLSLVITLYCGRARVKFSRSADAPAYQQGQNQLYNELNLGRREEYDVLDKRRGRDPEMGGKPRRKNPQEGLYNELQKDKMAEAYSEIGMKGERRRGKGHDGLYQGLSTATKDTYDALHMQALPPRSRGSGATNFSLLKQAGDVEENPGPGIHMATYEVLCEVARKLGTDDREVVLFLLNVFIPQPTLAQLIGALRALKEEGRLTFPLLAECLFRAGRRDLLRDLLHLDPRFLERHLAGTMSYFSPYQLTVLHVDGELCARDIRSLIFLSKDTIGSRSTPQTFLHWVYCMENLDLLGPTDVDALMSMLRSLSRVDLQRQVQTLMGLHLSGPSHSQHYRHTPLETDFYDYKDDDDKTSGSGEGRGSLLTCGDVEENPGPHMTEYKPTVRLATRDDVPRAVRTLAAAFADYPATRHTVDPDRHIERVTELQELFLTRVGLDIGKVWVADDGAAVAVWTTPESVEAGAVFAEIGPRMAELSGSRLAAQQQMEGLLAPHRPKEPAWFLATVGVSPDHQGKGLGSAVVLPGVEAAERAGVPAFLETSAPRNLPFYERLGFTVTADVEVPEGPRTWCMTRKPGA

SEQ ID NO: 2684 - protein, 930 aa, Artificial Sequence
  Synthetic Polypeptide
MALPVTALLLPLALLLHAARPINIYNAEPANPSEKNSPEFQIVLTQSPATLSASPGEKATMTCSASSGVNYMHWYQQKPGTSPKRWIYDTDKTASGVPARFSGSGSGTSYSLTISSMEAEDAATYYCHQRGSYTFGGGTKLEIKGGGGSGGGGSGGGGSQVQLEQPGAEVVKPGASVKVSCKTSGYTFTSNWMHWVKQTPGKGLEWIGEIDPSDSYTNYNQKFDGKAKLTVDKSSSTAYMEVSDLTAEDSATYYCARGSNPYYYAMDYWGQGTSVTVSSTREQKLISEEDLAKPTTTPAPRPPTPAPTIASQPLSLRPEACRPAAGGAVHTRGLDFACDIYIWAPLAGTCGVLLLSLVITLYCGRARVKFSRSADAPAYQQGQNQLYNELNLGRREEYDVLDKRRGRDPEMGGKPRRKNPQEGLYNELQKDKMAEAYSEIGMKGERRRGKGHDGLYQGLSTATKDTYDALHMQALPPRSRGSGATNFSLLKQAGDVEENPGPGIHMATYEVLCEVARKLGTDDREVVLFLLNVFIPQPTLAQLIGALRALKEEGRLTFPLLAECLFRAGRRDLLRDLLHLDPRFLERHLAGTMSYFSPYQLTVLHVDGELCARDIRSLIFLSKDTIGSRSTPQTFLHWVYCMENLDLLGPTDVDALMSMLRSLSRVDLQRQVQTLMGLHLSGPSHSQHYRHTPLETDFYDYKDDDDKTSGSGEGRGSLLTCGDVEENPGPHMTEYKPTVRLATRDDVPRAVRTLAAAFADYPATRHTVDPDRHIERVTELQELFLTRVGLDIGKVWVADDGAAVAVWTTPESVEAGAVFAEIGPRMAELSGSRLAAQQQMEGLLAPHRPKEPAWFLATVGVSPDHQGKGLGSAVVLPGVEAAERAGVPAFLETSAPRNLPFYERLGFTVTADVEVPEGPRTWCMTRKPGA

SEQ ID NO: 2685 - protein, 916 aa, Artificial Sequence
  Synthetic Polypeptide
MALPVTALLLPLALLLHAARPDIQMTQSPSSLSASVGDRVTITCKASDHINNWLAWYQQKPGQAPKLLIYGATTLETGVPSRFSGSGSGTDYTLTISSLQPEDFATYYCQQSWNTPWTFGQGTKLEIKRGGGGSGGGGSGGGGSQVQLQQPGAELVKPGASVKMSCKASGYAFSSYWINWMKQKPGQGLEWIGQIYPGDGDTNYNGKFKGRATLTADTSSSTAYMQLSSLTSEDSAVYFCARSITTVVGCAMDYWGQGTSVTVSSTREQKLISEEDLAKPTTTPAPRPPTPAPTIASQPLSLRPEACRPAAGGAVHTRGLDFACDIYIWAPLAGTCGVLLLSLVITLYCGRARVKFSRSADAPAYQQGQNQLYNELNLGRREEYDVLDKRRGRDPEMGGKPRRKNPQEGLYNELQKDKMAEAYSEIGMKGERRRGKGHDGLYQGLSTATKDTYDALHMQALPPRSRGSGATNFSLLKQAGDVEENPGPGIHMATYEVLCEVARKLGTDDREVVLFLLNVFIPQPTLAQLIGALRALKEEGRLTFPLLAECLFRAGRRDLLRDLLHLDPRFLERHLAGTMSYFSPYQLTVLHVDGELCARDIRSLIFLSKDTIGSRSTPQTFLHWVYCMENLDLLGPTDVDALMSMLRSLSRVDLQRQVQTLMGLHLSGPSHSQHYRHTPLETDFYDYKDDDDKTSGSGEGRGSLLTCGDVEENPGPHMTEYKPTVRLATRDDVPRAVRTLAAAFADYPATRHTVDPDRHIERVTELQELFLTRVGLDIGKVWVADDGAAVAVWTTPESVEAGAVFAEIGPRMAELSGSRLAAQQQMEGLLAPHRPKEPAWFLATVGVSPDHQGKGLGSAVVLPGVEAAERAGVPAFLETSAPRNLPFYERLGFTVTADVEVPEGPRTWCMTRKPGA

SEQ ID NO: 2686 - protein, 924 aa, Artificial Sequence
  Synthetic Polypeptide
MALPVTALLLPLALLLHAARPDDIQLTQSPSSLSASVGDRVTITCKASQSVDYDGDSYLNWYQQIPGKAPKLLIYDASNLVSGIPPRFSGSGSGTDYTFTISSLQPEDIATYHCQQSTEDPWTFGGGTKLQIKRGGGGSGGGGSGGGGSQVQLQQSGAEVKKPGSSVKVSCKASGYAFSSYWMNWVRQRPGQGLEWIGQIWPGDGDTNYNGKFKGRATITADESTNTAYMELSSLRSEDTAFYSCARRETTTVGRYYYAMDYWGQGTTVTVSSTREQKLISEEDLAKPTTTPAPRPPTPAPTIASQPLSLRPEACRPAAGGAVHTRGLDFACDIYIWAPLAGTCGVLLLSLVITLYCGRARVKFSRSADAPAYQQGQNQLYNELNLGRREEYDVLDKRRGRDPEMGGKPRRKNPQEGLYNELQKDKMAEAYSEIGMKGERRRGKGHDGLYQGLSTATKDTYDALHMQALPPRSRGSGATNFSLLKQAGDVEENPGPGIHMATYEVLCEVARKLGTDDREVVLFLLNVFIPQPTLAQLIGALRALKEEGRLTFPLLAECLFRAGRRDLLRDLLHLDPRFLERHLAGTMSYFSPYQLTVLHVDGELCARDIRSLIFLSKDTIGSRSTPQTFLHWVYCMENLDLLGPTDVDALMSMLRSLSRVDLQRQVQTLMGLHLSGPSHSQHYRHTPLETDFYDYKDDDDKTSGSGEGRGSLLTCGDVEENPGPHMTEYKPTVRLATRDDVPRAVRTLAAAFADYPATRHTVDPDRHIERVTELQELFLTRVGLDIGKVWVADDGAAVAVWTTPESVEAGAVFAEIGPRMAELSGSRLAAQQQMEGLLAPHRPKEPAWFLATVGVSPDHQGKGLGSAVVLPGVEAAERAGVPAFLETSAPRNLPFYERLGFTVTADVEVPEGPRTWCMTRKPGA

SEQ ID NO: 2687 - protein, 915 aa, Artificial Sequence
  Synthetic Polypeptide
MALPVTALLLPLALLLHAARPQSVLTQPASVSGSPGQSITISCTGTSSDVGGYNYVSWYQQHPGKAPKLMIYDVNNRPSEVSNRFSGSKSGNTASLTISGLQAEDEADYYCSSYTTGSRAVFGGGTKLTVLGGGGGSGGGGSGGGGSEVQLVQSGAEVKKPGESLTISCKASGYSFPNYWITWVRQMSGGGLEWMGRIDPGDSYTTYNPSFQGHVTISIDKSTNTAYLHWNSLKASDTAMYYCARYYVSLVDIWGQGTLVTVSSTREQKLISEEDLAKPTTTPAPRPPTPAPTIASQPLSLRPEACRPAAGGAVHTRGLDFACDIYIWAPLAGTCGVLLLSLVITLYCGRARVKFSRSADAPAYQQGQNQLYNELNLGRREEYDVLDKRRGRDPEMGGKPRRKNPQEGLYNELQKDKMAEAYSEIGMKGERRRGKGHDGLYQGLSTATKDTYDALHMQALPPRSRGSGATNFSLLKQAGDVEENPGPGIHMATYEVLCEVARKLGTDDREVVLFLLNVFIPQPTLAQLIGALRALKEEGRLTFPLLAECLFRAGRRDLLRDLLHLDPRFLERHLAGTMSYFSPYQLTVLHVDGELCARDIRSLIFLSKDTIGSRSTPQTFLHWVYCMENLDLLGPTDVDALMSMLRSLSRVDLQRQVQTLMGLHLSGPSHSQHYRHTPLETDFYDYKDDDDKTSGSGEGRGSLLTCGDVEENPGPHMTEYKPTVRLATRDDVPRAVRTLAAAFADYPATRHTVDPDRHIERVTELQELFLTRVGLDIGKVWVADDGAAVAVWTTPESVEAGAVFAEIGPRMAELSGSRLAAQQQMEGLLAPHRPKEPAWFLATVGVSPDHQGKGLGSAVVLPGVEAAERAGVPAFLETSAPRNLPFYERLGFTVTADVEVPEGPRTWCMTRKPGA

SEQ ID NO: 2688 - protein, 921 aa, Artificial Sequence
  Synthetic Polypeptide
MALPVTALLLPLALLLHAARPQSVVTQPPSVSAAPGQKVTISCSGSSSNIGNNYVSWYQQLPGTAPKLLIYDNNKRPSGIPDRFSGSKSGTSATLGITGLQTGDEADYYCGTWDGSLYTMLFGGGTKLTVLGGGGSGGGGSGGGGSEVQLVESGGGLVKPGGSLRLSCAASGFTFSNAWMSWVRQAPGKGLEWVGFIRSKAYGGTTEYAASVKGRFTISRDDSKSIAYLQMNNLKTEDTAVYYCARDGLYSSSWYDSDYWGQGTLVTVSSTREQKLISEEDLAKPTTTPAPRPPTPAPTIASQPLSLRPEACRPAAGGAVHTRGLDFACDIYIWAPLAGTCGVLLLSLVITLYCGRARVKFSRSADAPAYQQGQNQLYNELNLGRREEYDVLDKRRGRDPEMGGKPRRKNPQEGLYNELQKDKMAEAYSEIGMKGERRRGKGHDGLYQGLSTATKDTYDALHMQALPPRSRGSGATNFSLLKQAGDVEENPGPGIHMATYEVLCEVARKLGTDDREVVLFLLNVFIPQPTLAQLIGALRALKEEGRLTFPLLAECLFRAGRRDLLRDLLHLDPRFLERHLAGTMSYFSPYQLTVLHVDGELCARDIRSLIFLSKDTIGSRSTPQTFLHWVYCMENLDLLGPTDVDALMSMLRSLSRVDLQRQVQTLMGLHLSGPSHSQHYRHTPLETDFYDYKDDDDKTSGSGEGRGSLLTCGDVEENPGPHMTEYKPTVRLATRDDVPRAVRTLAAAFADYPATRHTVDPDRHIERVTELQELFLTRVGLDIGKVWVADDGAAVAVWTTPESVEAGAVFAEIGPRMAELSGSRLAAQQQMEGLLAPHRPKEPAWFLATVGVSPDHQGKGLGSAVVLPGVEAAERAGVPAFLETSAPRNLPFYERLGFTVTADVEVPEGPRTWCMTRKPGA

SEQ ID NO: 2689 - protein, 926 aa, Artificial Sequence
  Synthetic Polypeptide
MALPVTALLLPLALLLHAARPQSVLTQPPSVSGAPGQRVTISCTGSSSNIGAGYDVHWYQQLPGTAPKLLIFGNSNRPSGVPDRFSGFKSGTSASLAITGLQAEDEADYFCQSYDSSLSGSGVFGTGTKVTVLGGGGGSGGGGSGGGGSQMQLVQSGGGLVQPGRSLRLSCAASGFTFDDYAMHWVRQAPGKGLEWVSGISWNSGSIGYADSVKGRFTISRDNAKNSLYLQMNSLRAEDTALYYCAKDIHSGSYYGLLYYAMDVWGQGTTVTVSSTREQKLISEEDLAKPTTTPAPRPPTPAPTIASQPLSLRPEACRPAAGGAVHTRGLDFACDIYIWAPLAGTCGVLLLSLVITLYCGRARVKFSRSADAPAYQQGQNQLYNELNLGRREEYDVLDKRRGRDPEMGGKPRRKNPQEGLYNELQKDKMAEAYSEIGMKGERRRGKGHDGLYQGLSTATKDTYDALHMQALPPRSRGSGATNFSLLKQAGDVEENPGPGIHMATYEVLCEVARKLGTDDREVVLFLLNVFIPQPTLAQLIGALRALKEEGRLTFPLLAECLFRAGRRDLLRDLLHLDPRFLERHLAGTMSYFSPYQLTVLHVDGELCARDIRSLIFLSKDTIGSRSTPQTFLHWVYCMENLDLLGPTDVDALMSMLRSLSRVDLQRQVQTLMGLHLSGPSHSQHYRHTPLETDFYDYKDDDDKTSGSGEGRGSLLTCGDVEENPGPHMTEYKPTVRLATRDDVPRAVRTLAAAFADYPATRHTVDPDRHIERVTELQELFLTRVGLDIGKVWVADDGAAVAVWTTPESVEAGAVFAEIGPRMAELSGSRLAAQQQMEGLLAPHRPKEPAWFLATVGVSPDHQGKGLGSAVVLPGVEAAERAGVPAFLETSAPRNLPFYERLGFTVTADVEVPEGPRTWCMTRKPGA

SEQ ID NO: 2690 - protein, 913 aa, Artificial Sequence
  Synthetic Polypeptide
MALPVTALLLPLALLLHAARPDYIHVTQSPSSLSVSIGDRVTINCQTSQGVGSDLHWYQHKPGRAPKLLIHHASSVEDGVPSRFSGTGFHTSFNLTINDLQADDIGTYYCQVLQSFGRGSRLDTKGGGGSGGGGSGGGGSRAHLVQSGTAMKKPGASVRVSCQTSGYTFTAHILFWFRQAPGRGLEWVGWIKPQYGAVNFGGGFRDRVTLTRDVYREIAYMDIRGLKPDDTAVYYCARDRSYGDSSWALDAWGQGTTVVVSATREQKLISEEDLAKPTTTPAPRPPTPAPTIASQPLSLRPEACRPAAGGAVHTRGLDFACDIYIWAPLAGTCGVLLLSLVITLYCGRARVKFSRSADAPAYQQGQNQLYNELNLGRREEYDVLDKRRGRDPEMGGKPRRKNPQEGLYNELQKDKMAEAYSEIGMKGERRRGKGHDGLYQGLSTATKDTYDALHMQALPPRSRGSGATNFSLLKQAGDVEENPGPGIHMATYEVLCEVARKLGTDDREVVLFLLNVFIPQPTLAQLIGALRALKEEGRLTFPLLAECLFRAGRRDLLRDLLHLDPRFLERHLAGTMSYFSPYQLTVLHVDGELCARDIRSLIFLSKDTIGSRSTPQTFLHWVYCMENLDLLGPTDVDALMSMLRSLSRVDLQRQVQTLMGLHLSGPSHSQHYRHTPLETDFYDYKDDDDKTSGSGEGRGSLLTCGDVEENPGPHMTEYKPTVRLATRDDVPRAVRTLAAAFADYPATRHTVDPDRHIERVTELQELFLTRVGLDIGKVWVADDGAAVAVWTTPESVEAGAVFAEIGPRMAELSGSRLAAQQQMEGLLAPHRPKEPAWFLATVGVSPDHQGKGLGSAVVLPGVEAAERAGVPAFLETSAPRNLPFYERLGFTVTADVEVPEGPRTWCMTRKPGA

SEQ ID NO: 2691 - protein, 923 aa, Artificial Sequence
  Synthetic Polypeptide
MALPVTALLLPLALLLHAARPDVQMIQTPDSLAVSLGQRATISCRASESVDNYGISFMHWYQQKPGQSPKLLIYRASNLESGIPARFSGSGSRTDFTLTINPVETDDVATYYCQQNNKDPPTFGGGTKLEIKGGGGSGGGGSGGGGSGGGGSQVQLQQSGAELVKPGASVKISCKASGYAFSSYWMNWVKQRPGKGLEWIGQIYPGDGDTTYNGKFKGKATLTADKSSSTVYMQLNSLTSEDSAVYFCVRYYYGSSGYFDYWGQGTTLTVSSTREQKLISEEDLAKPTTTPAPRPPTPAPTIASQPLSLRPEACRPAAGGAVHTRGLDFACDIYIWAPLAGTCGVLLLSLVITLYCGRARVKFSRSADAPAYQQGQNQLYNELNLGRREEYDVLDKRRGRDPEMGGKPRRKNPQEGLYNELQKDKMAEAYSEIGMKGERRRGKGHDGLYQGLSTATKDTYDALHMQALPPRSRGSGATNFSLLKQAGDVEENPGPGIHMATYEVLCEVARKLGTDDREVVLFLLNVFIPQPTLAQLIGALRALKEEGRLTFPLLAECLFRAGRRDLLRDLLHLDPRFLERHLAGTMSYFSPYQLTVLHVDGELCARDIRSLIFLSKDTIGSRSTPQTFLHWVYCMENLDLLGPTDVDALMSMLRSLSRVDLQRQVQTLMGLHLSGPSHSQHYRHTPLETDFYDYKDDDDKTSGSGEGRGSLLTCGDVEENPGPHMTEYKPTVRLATRDDVPRAVRTLAAAFADYPATRHTVDPDRHIERVTELQELFLTRVGLDIGKVWVADDGAAVAVWTTPESVEAGAVFAEIGPRMAELSGSRLAAQQQMEGLLAPHRPKEPAWFLATVGVSPDHQGKGLGSAVVLPGVEAAERAGVPAFLETSAPRNLPFYERLGFTVTADVEVPEGPRTWCMTRKPGA

SEQ ID NO: 2692 - protein, 914 aa, Artificial Sequence
  Synthetic Polypeptide
MALPVTALLLPLALLLHAARPDVQMIQTPSSLSASLGDRVTISCRASQDIGNYLNWYQQKPDGTVKLLIYYTSRLHSGVPSRFSGSGSGTEYSLTISNLEQEDIATYFCQQGSALPPTFGGGTKLEINGGGGSGGGGSGGGGSALQLQQSGAELVRPGASVTLSCKASGYTFTDYEMHWVKQTPVHGLEWIGAIDPETGGTAYNQKFEGKAILTADKSSSTAYMELRSLTSEDSPVYYCARRRYYGSSSFDYWGQGTTLTVSSTREQKLISEEDLAKPTTTPAPRPPTPAPTIASQPLSLRPEACRPAAGGAVHTRGLDFACDIYIWAPLAGTCGVLLLSLVITLYCGRARVKFSRSADAPAYQQGQNQLYNELNLGRREEYDVLDKRRGRDPEMGGKPRRKNPQEGLYNELQKDKMAEAYSEIGMKGERRRGKGHDGLYQGLSTATKDTYDALHMQALPPRSRGSGATNFSLLKQAGDVEENPGPGIHMATYEVLCEVARKLGTDDREVVLFLLNVFIPQPTLAQLIGALRALKEEGRLTFPLLAECLFRAGRRDLLRDLLHLDPRFLERHLAGTMSYFSPYQLTVLHVDGELCARDIRSLIFLSKDTIGSRSTPQTFLHWVYCMENLDLLGPTDVDALMSMLRSLSRVDLQRQVQTLMGLHLSGPSHSQHYRHTPLETDFYDYKDDDDKTSGSGEGRGSLLTCGDVEENPGPHMTEYKPTVRLATRDDVPRAVRTLAAAFADYPATRHTVDPDRHIERVTELQELFLTRVGLDIGKVWVADDGAAVAVWTTPESVEAGAVFAEIGPRMAELSGSRLAAQQQMEGLLAPHRPKEPAWFLATVGVSPDHQGKGLGSAVVLPGVEAAERAGVPAFLETSAPRNLPFYERLGFTVTADVEVPEGPRTWCMTRKPGA

SEQ ID NO: 2693 - protein, 921 aa, Artificial Sequence
  Synthetic Polypeptide
MRLPAQLLGLLMLWVSGSSGDVVMTQSPLSLPVTPGAPASISCRSSQSIVHSNGNTYLEWYLQKPGQSPKLLIYKVSNRFSGVPDRFSGSGSGTDFTLRISRVEAEDVGIYYCFQGSHVPPTFGPGTKLEIKGGGGSGGGGSGGGGSEVQLVESGGGLVQPGGSLRLSCSASGFTFSSFGMHWVRQAPGKGLEWVAYISSGSSTIYYGDTVKGRFTISRDNAKNSLFLQMSSLRAEDTAVYYCAREGGYYYGRSYYTMDYWGQGTTVTVSTREQKLISEEDLAKPTTTPAPRPPTPAPTIASQPLSLRPEACRPAAGGAVHTRGLDFACDIYIWAPLAGTCGVLLLSLVITLYCGRARVKFSRSADAPAYQQGQNQLYNELNLGRREEYDVLDKRRGRDPEMGGKPRRKNPQEGLYNELQKDKMAEAYSEIGMKGERRRGKGHDGLYQGLSTATKDTYDALHMQALPPRSRGSGATNFSLLKQAGDVEENPGPGIHMATYEVLCEVARKLGTDDREVVLFLLNVFIPQPTLAQLIGALRALKEEGRLTFPLLAECLFRAGRRDLLRDLLHLDPRFLERHLAGTMSYFSPYQLTVLHVDGELCARDIRSLIFLSKDTIGSRSTPQTFLHWVYCMENLDLLGPTDVDALMSMLRSLSRVDLQRQVQTLMGLHLSGPSHSQHYRHTPLETDFYDYKDDDDKTSGSGEGRGSLLTCGDVEENPGPHMTEYKPTVRLATRDDVPRAVRTLAAAFADYPATRHTVDPDRHIERVTELQELFLTRVGLDIGKVWVADDGAAVAVWTTPESVEAGAVFAEIGPRMAELSGSRLAAQQQMEGLLAPHRPKEPAWFLATVGVSPDHQGKGLGSAVVLPGVEAAERAGVPAFLETSAPRNLPFYERLGFTVTADVEVPEGPRTWCMTRKPGA

SEQ ID NO: 2694 - protein, 946 aa, Artificial Sequence
  Synthetic Polypeptide
MALPVTALLLPLALLLHAARPARKRTQPTFGFTVNWKFSESTTVFTGQCFIDRNGKEVLKTMWLLRSSVNDIGDDWKATRVGINIFTRLRTQKEGGSGGSARKCSLTGKWTNDLGSNMTIGAVNSRGEFTGTYITAVTATSNEIKESPLHGTQNTINKSGGSTTVFTGQCFIDRNGKEVLKTMWLLRSSVNDIGDDWKATRVGINIFTRLRTQKEGGSGGSARKCSLTGKWTNDLGSNMTIGAVNSRGEFTGTYITAVTATSNEIKESPLHGTQNTINKRTQPTFGFTVNWKFSETREQKLISEEDLAKPTTTPAPRPPTPAPTIASQPLSLRPEACRPAAGGAVHTRGLDFACDIYIWAPLAGTCGVLLLSLVITLYCGRARVKFSRSADAPAYQQGQNQLYNELNLGRREEYDVLDKRRGRDPEMGGKPRRKNPQEGLYNELQKDKMAEAYSEIGMKGERRRGKGHDGLYQGLSTATKDTYDALHMQALPPRSRGSGATNFSLLKQAGDVEENPGPGIHMATYEVLCEVARKLGTDDREVVLFLLNVFIPQPTLAQLIGALRALKEEGRLTFPLLAECLFRAGRRDLLRDLLHLDPRFLERHLAGTMSYFSPYQLTVLHVDGELCARDIRSLIFLSKDTIGSRSTPQTFLHWVYCMENLDLLGPTDVDALMSMLRSLSRVDLQRQVQTLMGLHLSGPSHSQHYRHTPLETDFYDYKDDDDKTSGSGEGRGSLLTCGDVEENPGPHMTEYKPTVRLATRDDVPRAVRTLAAAFADYPATRHTVDPDRHIERVTELQELFLTRVGLDIGKVWVADDGAAVAVWTTPESVEAGAVFAEIGPRMAELSGSRLAAQQQMEGLLAPHRPKEPAWFLATVGVSPDHQGKGLGSAVVLPGVEAAERAGVPAFLETSAPRNLPFYERLGFTVTADVEVPEGPRTWCMTRKPGA

SEQ ID NO: 2695 - protein, 918 aa, Artificial Sequence
  Synthetic Polypeptide
MALPVTALLLPLALLLHAARPDIVLTQSPASLAVSLGQRATISCRASKSVSTSGYSYLHWYQQKPGQPPKLLIYLASNLESGVPARFSGSGSGTDFTLNIHPVEEEDAATYYCQHSRELPFTFGSGTKLEIKGGGGSGGGGSGGGGSQVQLVESGGGLVQPGGSLKLSCAASGFDFSRYWMSWVRQAPGKGLEWIGEINPTSSTINFTPSLKDKVFISRDNAKNTLYLQMSKVRSEDTALYYCARGNYYRYGDAMDYWGQGTSVTVSTREQKLISEEDLAKPTTTPAPRPPTPAPTIASQPLSLRPEACRPAAGGAVHTRGLDFACDIYIWAPLAGTCGVLLLSLVITLYCGRARVKFSRSADAPAYQQGQNQLYNELNLGRREEYDVLDKRRGRDPEMGGKPRRKNPQEGLYNELQKDKMAEAYSEIGMKGERRRGKGHDGLYQGLSTATKDTYDALHMQALPPRSRGSGATNFSLLKQAGDVEENPGPGIHMATYEVLCEVARKLGTDDREVVLFLLNVFIPQPTLAQLIGALRALKEEGRLTFPLLAECLFRAGRRDLLRDLLHLDPRFLERHLAGTMSYFSPYQLTVLHVDGELCARDIRSLIFLSKDTIGSRSTPQTFLHWVYCMENLDLLGPTDVDALMSMLRSLSRVDLQRQVQTLMGLHLSGPSHSQHYRHTPLETDFYDYKDDDDKTSGSGEGRGSLLTCGDVEENPGPHMTEYKPTVRLATRDDVPRAVRTLAAAFADYPATRHTVDPDRHIERVTELQELFLTRVGLDIGKVWVADDGAAVAVWTTPESVEAGAVFAEIGPRMAELSGSRLAAQQQMEGLLAPHRPKEPAWFLATVGVSPDHQGKGLGSAVVLPGVEAAERAGVPAFLETSAPRNLPFYERLGFTVTADVEVPEGPRTWCMTRKPGA

SEQ ID NO: 2696 - protein, 916 aa, Artificial Sequence
  Synthetic Polypeptide
MALPVTALLLPLALLLHAARPDIQMTQSPSSLSASVGDRVTITCSASQDISNYLNWYQQKPGKAPKLLIYYTSNLHSGVPSRFSGSGSGTDFTLTISSLQPEDFATYYCQQYRKLPWTFGQGTKLEIKRGGGGSGGGGSGGGGSQVQLVQSGAEVKKPGSSVKVSCKASGGTFSNYWMHWVRQAPGQGLEWMGATYRGHSDTYYNQKFKGRVTITADKSTSTAYMELSSLRSEDTAVYYCARGAIYDGYDVLDNWGQGTLVTVSSTREQKLISEEDLAKPTTTPAPRPPTPAPTIASQPLSLRPEACRPAAGGAVHTRGLDFACDIYIWAPLAGTCGVLLLSLVITLYCGRARVKFSRSADAPAYQQGQNQLYNELNLGRREEYDVLDKRRGRDPEMGGKPRRKNPQEGLYNELQKDKMAEAYSEIGMKGERRRGKGHDGLYQGLSTATKDTYDALHMQALPPRSRGSGATNFSLLKQAGDVEENPGPGIHMATYEVLCEVARKLGTDDREVVLFLLNVFIPQPTLAQLIGALRALKEEGRLTFPLLAECLFRAGRRDLLRDLLHLDPRFLERHLAGTMSYFSPYQLTVLHVDGELCARDIRSLIFLSKDTIGSRSTPQTFLHWVYCMENLDLLGPTDVDALMSMLRSLSRVDLQRQVQTLMGLHLSGPSHSQHYRHTPLETDFYDYKDDDDKTSGSGEGRGSLLTCGDVEENPGPHMTEYKPTVRLATRDDVPRAVRTLAAAFADYPATRHTVDPDRHIERVTELQELFLTRVGLDIGKVWVADDGAAVAVWTTPESVEAGAVFAEIGPRMAELSGSRLAAQQQMEGLLAPHRPKEPAWFLATVGVSPDHQGKGLGSAVVLPGVEAAERAGVPAFLETSAPRNLPFYERLGFTVTADVEVPEGPRTWCMTRKPGA

SEQ ID NO: 2697 - protein, 916 aa, Artificial Sequence
  Synthetic Polypeptide
MALPVTALLLPLALLLHAARPDIVLTQSPATLSLSPGDRATISCRASESVTILGSHLIYWYQQKPGQPPRLLIQLASNVQTGVPARFSGSGSRTDFTLTISSVEPEDFAVYYCLQSRTIPRTFGQGTKLEIKRGGGGSGGGGSGGGGSQVQLVQSGPEVKKPGESVKISCKASGYTFRHYSMNWVKQAPGQGLKWMGRINTESGVPIYADDFKGRFSFTVDTSASTAYLEISSLTSEDTAVYFCSNDYLYSLDFWGQGTTLTVSSTREQKLISEEDLAKPTTTPAPRPPTPAPTIASQPLSLRPEACRPAAGGAVHTRGLDFACDIYIWAPLAGTCGVLLLSLVITLYCGRARVKFSRSADAPAYQQGQNQLYNELNLGRREEYDVLDKRRGRDPEMGGKPRRKNPQEGLYNELQKDKMAEAYSEIGMKGERRRGKGHDGLYQGLSTATKDTYDALHMQALPPRSRGSGATNFSLLKQAGDVEENPGPGIHMATYEVLCEVARKLGTDDREVVLFLLNVFIPQPTLAQLIGALRALKEEGRLTFPLLAECLFRAGRRDLLRDLLHLDPRFLERHLAGTMSYFSPYQLTVLHVDGELCARDIRSLIFLSKDTIGSRSTPQTFLHWVYCMENLDLLGPTDVDALMSMLRSLSRVDLQRQVQTLMGLHLSGPSHSQHYRHTPLETDFYDYKDDDDKTSGSGEGRGSLLTCGDVEENPGPHMTEYKPTVRLATRDDVPRAVRTLAAAFADYPATRHTVDPDRHIERVTELQELFLTRVGLDIGKVWVADDGAAVAVWTTPESVEAGAVFAEIGPRMAELSGSRLAAQQQMEGLLAPHRPKEPAWFLATVGVSPDHQGKGLGSAVVLPGVEAAERAGVPAFLETSAPRNLPFYERLGFTVTADVEVPEGPRTWCMTRKPGA

SEQ ID NO: 2698 - protein, 917 aa, Artificial Sequence
  Synthetic Polypeptide
MALPVTALLLPLALLLHAARPQSVLTQPPSVSGAPGQRVTISCTGSSSNIGAGFDVHWYQQLPGTAPKLLIYGNSNRPSGVPDRFSGSKSGTSASLAITGLQAEDEADYYCQSYDSSLSGYVFGTGTKVTVLGGGGGSGGGGSGGGGSQVQLVQSGAEVKKPGASVKVSCKASGYTFTDYYMHWVRQAPGQRLEWMGWINPNSGGTNYAQKFQDRITVTRDTSSNTGYMELTRLRSDDTAVYYCARSPYSGVLDKWGQGTLVTVSSTREQKLISEEDLAKPTTTPAPRPPTPAPTIASQPLSLRPEACRPAAGGAVHTRGLDFACDIYIWAPLAGTCGVLLLSLVITLYCGRARVKFSRSADAPAYQQGQNQLYNELNLGRREEYDVLDKRRGRDPEMGGKPRRKNPQEGLYNELQKDKMAEAYSEIGMKGERRRGKGHDGLYQGLSTATKDTYDALHMQALPPRSRGSGATNFSLLKQAGDVEENPGPGIHMATYEVLCEVARKLGTDDREVVLFLLNVFIPQPTLAQLIGALRALKEEGRLTFPLLAECLFRAGRRDLLRDLLHLDPRFLERHLAGTMSYFSPYQLTVLHVDGELCARDIRSLIFLSKDTIGSRSTPQTFLHWVYCMENLDLLGPTDVDALMSMLRSLSRVDLQRQVQTLMGLHLSGPSHSQHYRHTPLETDFYDYKDDDDKTSGSGEGRGSLLTCGDVEENPGPHMTEYKPTVRLATRDDVPRAVRTLAAAFADYPATRHTVDPDRHIERVTELQELFLTRVGLDIGKVWVADDGAAVAVWTTPESVEAGAVFAEIGPRMAELSGSRLAAQQQMEGLLAPHRPKEPAWFLATVGVSPDHQGKGLGSAVVLPGVEAAERAGVPAFLETSAPRNLPFYERLGFTVTADVEVPEGPRTWCMTRKPGA

SEQ ID NO: 2699 - protein, 915 aa, Artificial Sequence
  Synthetic Polypeptide
MALPVTALLLPLALLLHAARPQAVLTQPPSASGTPGQRVTISCSGSSSNIGSYTVSWYQQLPGTAPKFLIYSNNQRPSGVPDRFSGSKSGTSASLAISGLQSEDEADYYCAAWDDSLNGYVFGTGTKVTVLGGGGGSGGGGSGGGGSEVQLVQSGAEVKKPGESLKISCKGSGYDFTTYWIGWVRQMPGKGLEWMGIIYPGDSDTRYSPSVRGRVTISADKSINTAYLQWSSLEASDTAMYYCARMWTFSQDGWGQGTLVTVSSTREQKLISEEDLAKPTTTPAPRPPTPAPTIASQPLSLRPEACRPAAGGAVHTRGLDFACDIYIWAPLAGTCGVLLLSLVITLYCGRARVKFSRSADAPAYQQGQNQLYNELNLGRREEYDVLDKRRGRDPEMGGKPRRKNPQEGLYNELQKDKMAEAYSEIGMKGERRRGKGHDGLYQGLSTATKDTYDALHMQALPPRSRGSGATNFSLLKQAGDVEENPGPGIHMATYEVLCEVARKLGTDDREVVLFLLNVFIPQPTLAQLIGALRALKEEGRLTFPLLAECLFRAGRRDLLRDLLHLDPRFLERHLAGTMSYFSPYQLTVLHVDGELCARDIRSLIFLSKDTIGSRSTPQTFLHWVYCMENLDLLGPTDVDALMSMLRSLSRVDLQRQVQTLMGLHLSGPSHSQHYRHTPLETDFYDYKDDDDKTSGSGEGRGSLLTCGDVEENPGPHMTEYKPTVRLATRDDVPRAVRTLAAAFADYPATRHTVDPDRHIERVTELQELFLTRVGLDIGKVWVADDGAAVAVWTTPESVEAGAVFAEIGPRMAELSGSRLAAQQQMEGLLAPHRPKEPAWFLATVGVSPDHQGKGLGSAVVLPGVEAAERAGVPAFLETSAPRNLPFYERLGFTVTADVEVPEGPRTWCMTRKPGA

SEQ ID NO: 2700 - protein, 926 aa, Artificial Sequence
  Synthetic Polypeptide
MALPVTALLLPLALLLHAARPLPVLTQPPSASGTPGQRVTISCSGRSSNIGSNSVNWYRQLPGAAPKLLIYSNNQRPPGVPVRFSGSKSGTSASLAISGLQSEDEATYYCATWDDNLNVHYVFGTGTKVTVLGSRGGGGSGGGGSGGGGSLEMAQVQLVQSGAEVKKPGSSVKVSCKASGGTFSSYAISWVRQAPGQGLEWMGRIIPILGIANYAQKFQGRVTITADKSTSTAYMELSSLRSEDTAVYYCARGGYYSHDMWSEDWGQGTLVTVSSTREQKLISEEDLAKPTTTPAPRPPTPAPTIASQPLSLRPEACRPAAGGAVHTRGLDFACDIYIWAPLAGTCGVLLLSLVITLYCGRARVKFSRSADAPAYQQGQNQLYNELNLGRREEYDVLDKRRGRDPEMGGKPRRKNPQEGLYNELQKDKMAEAYSEIGMKGERRRGKGHDGLYQGLSTATKDTYDALHMQALPPRSRGSGATNFSLLKQAGDVEENPGPGIHMATYEVLCEVARKLGTDDREVVLFLLNVFIPQPTLAQLIGALRALKEEGRLTFPLLAECLFRAGRRDLLRDLLHLDPRFLERHLAGTMSYFSPYQLTVLHVDGELCARDIRSLIFLSKDTIGSRSTPQTFLHWVYCMENLDLLGPTDVDALMSMLRSLSRVDLQRQVQTLMGLHLSGPSHSQHYRHTPLETDFYDYKDDDDKTSGSGEGRGSLLTCGDVEENPGPHMTEYKPTVRLATRDDVPRAVRTLAAAFADYPATRHTVDPDRHIERVTELQELFLTRVGLDIGKVWVADDGAAVAVWTTPESVEAGAVFAEIGPRMAELSGSRLAAQQQMEGLLAPHRPKEPAWFLATVGVSPDHQGKGLGSAVVLPGVEAAERAGVPAFLETSAPRNLPFYERLGFTVTADVEVPEGPRTWCMTRKPGA

SEQ ID NO: 2701 - protein, 915 aa, Artificial Sequence
  Synthetic Polypeptide
MALPVTALLLPLALLLHAARPDIVLTQSPASLAVSLGERATINCRASESVSVIGAHLIHWYQQKPGQPPKLLIYLASNLETGVPARFSGSGSGTDFTLTISSLQAEDAAIYYCLQSRIFPRTFGQGTKLEIKGGGGSGGGGSGGGGSQVQLVQSGSELKKPGESVKISCKASGYTFTDYSINWVKQAPGQGLKWMGWINTETREPAYAYDFRGRFVFSLDTSASTAYLQISSLKAEDTAVYFCALDYSYAMDYWGQGTLVTVSSTREQKLISEEDLAKPTTTPAPRPPTPAPTIASQPLSLRPEACRPAAGGAVHTRGLDFACDIYIWAPLAGTCGVLLLSLVITLYCGRARVKFSRSADAPAYQQGQNQLYNELNLGRREEYDVLDKRRGRDPEMGGKPRRKNPQEGLYNELQKDKMAEAYSEIGMKGERRRGKGHDGLYQGLSTATKDTYDALHMQALPPRSRGSGATNFSLLKQAGDVEENPGPGIHMATYEVLCEVARKLGTDDREVVLFLLNVFIPQPTLAQLIGALRALKEEGRLTFPLLAECLFRAGRRDLLRDLLHLDPRFLERHLAGTMSYFSPYQLTVLHVDGELCARDIRSLIFLSKDTIGSRSTPQTFLHWVYCMENLDLLGPTDVDALMSMLRSLSRVDLQRQVQTLMGLHLSGPSHSQHYRHTPLETDFYDYKDDDDKTSGSGEGRGSLLTCGDVEENPGPHMTEYKPTVRLATRDDVPRAVRTLAAAFADYPATRHTVDPDRHIERVTELQELFLTRVGLDIGKVWVADDGAAVAVWTTPESVEAGAVFAEIGPRMAELSGSRLAAQQQMEGLLAPHRPKEPAWFLATVGVSPDHQGKGLGSAVVLPGVEAAERAGVPAFLETSAPRNLPFYERLGFTVTADVEVPEGPRTWCMTRKPGA

SEQ ID NO: 2702 - protein, 916 aa, Artificial Sequence
  Synthetic Polypeptide
MALPVTALLLPLALLLHAARPDIVLTQSPATLSLSPGDRATLSCRASESVTILGSHLIYWYQQKPGQAPRLLIQLASNVQTGIPARFSGSGSRTDFTLTISSLEPEDFAVYYCLQSRTIPRTFGQGTKLEIKRGGGGSGGGGSGGGGSQVQLVQSGSELKKPGESVKISCKASGYTFTHYSMNWVRQAPGQGLEWMGRINTETGEPLYADDFKGRFVFSLDTSASTAYLQISSLKAEDTAVYYCSNDYLYSLDYWGQGTLVTVSSTREQKLISEEDLAKPTTTPAPRPPTPAPTIASQPLSLRPEACRPAAGGAVHTRGLDFACDIYIWAPLAGTCGVLLLSLVITLYCGRARVKFSRSADAPAYQQGQNQLYNELNLGRREEYDVLDKRRGRDPEMGGKPRRKNPQEGLYNELQKDKMAEAYSEIGMKGERRRGKGHDGLYQGLSTATKDTYDALHMQALPPRSRGSGATNFSLLKQAGDVEENPGPGIHMATYEVLCEVARKLGTDDREVVLFLLNVFIPQPTLAQLIGALRALKEEGRLTFPLLAECLFRAGRRDLLRDLLHLDPRFLERHLAGTMSYFSPYQLTVLHVDGELCARDIRSLIFLSKDTIGSRSTPQTFLHWVYCMENLDLLGPTDVDALMSMLRSLSRVDLQRQVQTLMGLHLSGPSHSQHYRHTPLETDFYDYKDDDDKTSGSGEGRGSLLTCGDVEENPGPHMTEYKPTVRLATRDDVPRAVRTLAAAFADYPATRHTVDPDRHIERVTELQELFLTRVGLDIGKVWVADDGAAVAVWTTPESVEAGAVFAEIGPRMAELSGSRLAAQQQMEGLLAPHRPKEPAWFLATVGVSPDHQGKGLGSAVVLPGVEAAERAGVPAFLETSAPRNLPFYERLGFTVTADVEVPEGPRTWCMTRKPGA

SEQ ID NO: 2703 - protein, 917 aa, Artificial Sequence
  Synthetic Polypeptide
MALPVTALLLPLALLLHAARPDIVMTQSPDSLAVSLGERATINCKSSQSILYSSNQKNYLAWYQQKPGQSPKLLIYWASTRESGVPDRFSGSGSGTDFTLTISSLQAEDVAVYYCHQYISSYTFGQGTKLEIKGGGGSGGGGSGGGGSQVQLVQSGAEVKKPGASVKVSCKASGYTFASQWMHWMRQAPGQGLEWIGWINPGNVNTKYNEKFKGRATLTVDTSTNTAYMELSSLRSEDTAVYYCARSTWYRPLDYWGQGTLVTVSSTREQKLISEEDLAKPTTTPAPRPPTPAPTIASQPLSLRPEACRPAAGGAVHTRGLDFACDIYIWAPLAGTCGVLLLSLVITLYCGRARVKFSRSADAPAYQQGQNQLYNELNLGRREEYDVLDKRRGRDPEMGGKPRRKNPQEGLYNELQKDKMAEAYSEIGMKGERRRGKGHDGLYQGLSTATKDTYDALHMQALPPRSRGSGATNFSLLKQAGDVEENPGPGIHMATYEVLCEVARKLGTDDREVVLFLLNVFIPQPTLAQLIGALRALKEEGRLTFPLLAECLFRAGRRDLLRDLLHLDPRFLERHLAGTMSYFSPYQLTVLHVDGELCARDIRSLIFLSKDTIGSRSTPQTFLHWVYCMENLDLLGPTDVDALMSMLRSLSRVDLQRQVQTLMGLHLSGPSHSQHYRHTPLETDFYDYKDDDDKTSGSGEGRGSLLTCGDVEENPGPHMTEYKPTVRLATRDDVPRAVRTLAAAFADYPATRHTVDPDRHIERVTELQELFLTRVGLDIGKVWVADDGAAVAVWTTPESVEAGAVFAEIGPRMAELSGSRLAAQQQMEGLLAPHRPKEPAWFLATVGVSPDHQGKGLGSAVVLPGVEAAERAGVPAFLETSAPRNLPFYERLGFTVTADVEVPEGPRTWCMTRKPGA

SEQ ID NO: 2704 - protein, 1041 aa, Artificial Sequence
  Synthetic Polypeptide
MVRGVPFRHLLLVLQLALLPAATQGKKVVLGKKGDTVELTCTASQKKSIQFHWKNSNQIKILGNQGSFLTKGPSKLNDRADSRRSLWDQGNFPLIIKNLKIEDSDTYICEVEDQKEEVQLLVFGLTANSDTHLLQGQSLTLTLESPPGSSPSVQCRSPRGKNIQGGKTLSVSQLELQDSGTWTCTVLQNQKKVEFKIDIVVLAFQKASGGGGSGGGGSGGGGSIYQELTQLKAAVERLCHPCPWEWTFFQGNCYFMSNSQRNWHDSITACKEVGAQLVVIKSAEEQNFLQLQSSRSNRFTWMGLSDLNQEGTWQWVDGSPLLPSFKQYWNRGEPNNVGEEDCAEFSGNGWNDDKCNLAKFWICKKSAASCSRDEEQFLSPAPATPNPPPATREQKLISEEDLAKPTTTPAPRPPTPAPTIASQPLSLRPEACRPAAGGAVHTRGLDFACDIYIWAPLAGTCGVLLLSLVITLYCGRARVKFSRSADAPAYQQGQNQLYNELNLGRREEYDVLDKRRGRDPEMGGKPRRKNPQEGLYNELQKDKMAEAYSEIGMKGERRRGKGHDGLYQGLSTATKDTYDALHMQALPPRSRGSGATNFSLLKQAGDVEENPGPGIHMATYEVLCEVARKLGTDDREVVLFLLNVFIPQPTLAQLIGALRALKEEGRLTFPLLAECLFRAGRRDLLRDLLHLDPRFLERHLAGTMSYFSPYQLTVLHVDGELCARDIRSLIFLSKDTIGSRSTPQTFLHWVYCMENLDLLGPTDVDALMSMLRSLSRVDLQRQVQTLMGLHLSGPSHSQHYRHTPLETDFYDYKDDDDKTSGSGEGRGSLLTCGDVEENPGPHMTEYKPTVRLATRDDVPRAVRTLAAAFADYPATRHTVDPDRHIERVTELQELFLTRVGLDIGKVWVADDGAAVAVWTTPESVEAGAVFAEIGPRMAELSGSRLAAQQQMEGLLAPHRPKEPAWFLATVGVSPDHQGKGLGSAVVLPGVEAAERAGVPAFLETSAPRNLPFYERLGFTVTADVEVPEGPRTWCMTRKPGA

SEQ ID NO: 2705 - protein, 917 aa, Artificial Sequence
  Synthetic Polypeptide
MALPVTALLLPLALLLHAARPDHIVLTQSPSSLSASLGDRVTISCRASQDISTYLNWYQQKPDGTVKLLIFYTSRLHAGVPSRFSGSGSGTHHSLTISNLEQEDIATYFCQQGNSLPFTFGSGTKLEIKRGGGGSGGGGSGGGGSQVQLKESGPELEKPGASVKISCKASGYSFTAYSMNWVKQNNGMSLEWIGSIDPYYGDTKYAQKFKGKATLTVDKASSTAYLQLKSLTSEDSAVYYCARRMITTGDWYFDVWGAGTTVTVSSTREQKLISEEDLAKPTTTPAPRPPTPAPTIASQPLSLRPEACRPAAGGAVHTRGLDFACDIYIWAPLAGTCGVLLLSLVITLYCGRARVKFSRSADAPAYQQGQNQLYNELNLGRREEYDVLDKRRGRDPEMGGKPRRKNPQEGLYNELQKDKMAEAYSEIGMKGERRRGKGHDGLYQGLSTATKDTYDALHMQALPPRSRGSGATNFSLLKQAGDVEENPGPGIHMATYEVLCEVARKLGTDDREVVLFLLNVFIPQPTLAQLIGALRALKEEGRLTFPLLAECLFRAGRRDLLRDLLHLDPRFLERHLAGTMSYFSPYQLTVLHVDGELCARDIRSLIFLSKDTIGSRSTPQTFLHWVYCMENLDLLGPTDVDALMSMLRSLSRVDLQRQVQTLMGLHLSGPSHSQHYRHTPLETDFYDYKDDDDKTSGSGEGRGSLLTCGDVEENPGPHMTEYKPTVRLATRDDVPRAVRTLAAAFADYPATRHTVDPDRHIERVTELQELFLTRVGLDIGKVWVADDGAAVAVWTTPESVEAGAVFAEIGPRMAELSGSRLAAQQQMEGLLAPHRPKEPAWFLATVGVSPDHQGKGLGSAVVLPGVEAAERAGVPAFLETSAPRNLPFYERLGFTVTADVEVPEGPRTWCMTRKPGA

SEQ ID NO: 2706 - protein, 917 aa, Artificial Sequence; identical to SEQ ID NO: 2705
  Synthetic Polypeptide

SEQ ID NO: 2707 - protein, 864 aa, Artificial Sequence
  Synthetic Polypeptide
MALPVTALLLPLALLLHAARPGMRTEDLPKAVVFLEPQWYRVLEKDSVTLKCQGAYSPEDNSTQWFHNESLISSQASSYFIDAATVDDSGEYRCQTNLSTLSDPVQLEVHIGWLLLQAPRWVFKEEDPIHLRCHSWKNTALHKVTYLQNGKGRKYFHHNSDFYIPKATLKDSGSYFCRGLVGSKNVSSETVNITITQGLAVSTISSFFPPGYQTREQKLISEEDLAKPTTTPAPRPPTPAPTIASQPLSLRPEACRPAAGGAVHTRGLDFACDIYIWAPLAGTCGVLLLSLVITLYCGRARVKFSRSADAPAYQQGQNQLYNELNLGRREEYDVLDKRRGRDPEMGGKPRRKNPQEGLYNELQKDKMAEAYSEIGMKGERRRGKGHDGLYQGLSTATKDTYDALHMQALPPRSRGSGATNFSLLKQAGDVEENPGPGIHMATYEVLCEVARKLGTDDREVVLFLLNVFIPQPTLAQLIGALRALKEEGRLTFPLLAECLFRAGRRDLLRDLLHLDPRFLERHLAGTMSYFSPYQLTVLHVDGELCARDIRSLIFLSKDTIGSRSTPQTFLHWVYCMENLDLLGPTDVDALMSMLRSLSRVDLQRQVQTLMGLHLSGPSHSQHYRHTPLETDFYDYKDDDDKTSGSGEGRGSLLTCGDVEENPGPHMTEYKPTVRLATRDDVPRAVRTLAAAFADYPATRHTVDPDRHIERVTELQELFLTRVGLDIGKVWVADDGAAVAVWTTPESVEAGAVFAEIGPRMAELSGSRLAAQQQMEGLLAPHRPKEPAWFLATVGVSPDHQGKGLGSAVVLPGVEAAERAGVPAFLETSAPRNLPFYERLGFTVTADVEVPEGPRTWCMTRKPGA

SEQ ID NO: 2708 - protein, 864 aa, Artificial Sequence; identical to SEQ ID NO: 2707
  Synthetic Polypeptide

SEQ ID NO: 2709 - protein, 917 aa, Artificial Sequence
  Synthetic Polypeptide
MALPVTALLLPLALLLHAARPDEIVLTQSPATLSLSPGERATLSCRASQSVSSYLAWYQQKPGQAPRLLIYDASNRATGIPARFSGSGSGTDFTLTISSLEPEDFAVYYCQQRSNWPITFGQGTRLEIKGGGGSGGGGSGGGGSEVQLVESGGGLVQPGRSLRLSCAASGFTFNDYAMHWVRQAPGKGLEWVSTISWNSGSIGYADSVKGRFTISRDNAKKSLYLQMNSLRAEDTALYYCAKDIQYGNYYYGMDVWGQGTTVTVSSTREQKLISEEDLAKPTTTPAPRPPTPAPTIASQPLSLRPEACRPAAGGAVHTRGLDFACDIYIWAPLAGTCGVLLLSLVITLYCGRARVKFSRSADAPAYQQGQNQLYNELNLGRREEYDVLDKRRGRDPEMGGKPRRKNPQEGLYNELQKDKMAEAYSEIGMKGERRRGKGHDGLYQGLSTATKDTYDALHMQALPPRSRGSGATNFSLLKQAGDVEENPGPGIHMATYEVLCEVARKLGTDDREVVLFLLNVFIPQPTLAQLIGALRALKEEGRLTFPLLAECLFRAGRRDLLRDLLHLDPRFLERHLAGTMSYFSPYQLTVLHVDGELCARDIRSLIFLSKDTIGSRSTPQTFLHWVYCMENLDLLGPTDVDALMSMLRSLSRVDLQRQVQTLMGLHLSGPSHSQHYRHTPLETDFYDYKDDDDKTSGSGEGRGSLLTCGDVEENPGPHMTEYKPTVRLATRDDVPRAVRTLAAAFADYPATRHTVDPDRHIERVTELQELFLTRVGLDIGKVWVADDGAAVAVWTTPESVEAGAVFAEIGPRMAELSGSRLAAQQQMEGLLAPHRPKEPAWFLATVGVSPDHQGKGLGSAVVLPGVEAAERAGVPAFLETSAPRNLPFYERLGFTVTADVEVPEGPRTWCMTRKPGA

SEQ ID NO: 2710 - protein, 919 aa, Artificial Sequence
  Synthetic Polypeptide
MALPVTALLLPLALLLHAARPDIVMTQTPLSLPVTPGEPASISCRSSKSLLHSNGITYLYWYLQKPGQSPQLLIYQMSNLVSGVPDRFSGSGSGTDFTLKISRVEAEDVGVYYCAQNLELPYTFGGGTKVEIKRGGGGSGGGGSGGGGSQVQLVQSGAEVKKPGSSVKVSCKASGYAFSYSWINWVRQAPGQGLEWMGRIFPGDGDTDYNGKFKGRVTITADKSTSTAYMELSSLRSEDTAVYYCARNVFDGYWLVYWGQGTLVTVSSTREQKLISEEDLAKPTTTPAPRPPTPAPTIASQPLSLRPEACRPAAGGAVHTRGLDFACDIYIWAPLAGTCGVLLLSLVITLYCGRARVKFSRSADAPAYQQGQNQLYNELNLGRREEYDVLDKRRGRDPEMGGKPRRKNPQEGLYNELQKDKMAEAYSEIGMKGERRRGKGHDGLYQGLSTATKDTYDALHMQALPPRSRGSGATNFSLLKQAGDVEENPGPGIHMATYEVLCEVARKLGTDDREVVLFLLNVFIPQPTLAQLIGALRALKEEGRLTFPLLAECLFRAGRRDLLRDLLHLDPRFLERHLAGTMSYFSPYQLTVLHVDGELCARDIRSLIFLSKDTIGSRSTPQTFLHWVYCMENLDLLGPTDVDALMSMLRSLSRVDLQRQVQTLMGLHLSGPSHSQHYRHTPLETDFYDYKDDDDKTSGSGEGRGSLLTCGDVEENPGPHMTEYKPTVRLATRDDVPRAVRTLAAAFADYPATRHTVDPDRHIERVTELQELFLTRVGLDIGKVWVADDGAAVAVWTTPESVEAGAVFAEIGPRMAELSGSRLAAQQQMEGLLAPHRPKEPAWFLATVGVSPDHQGKGLGSAVVLPGVEAAERAGVPAFLETSAPRNLPFYERLGFTVTADVEVPEGPRTWCMTRKPGA

SEQ ID NO: 2711 - protein, 916 aa, Artificial Sequence
  Synthetic Polypeptide
MALPVTALLLPLALLLHAARPDIVLTQSPAIITASPGEKVTMTCRASSSVNYMDWYQKKPGSSPKPWIYATSNLASGVPSRFSGSGSGTTYSMTISSLEAEDAATYYCQQWSFNPPTFGGGTKLEIKRGGGGSGGGGSGGGGSEVQLQQSGAELKKPGASVKVSCKASGYTFTSYNMHWVKQTPGQGLEWIGAIYPGNGDTSYNQKFKGKTTLTADKSSSTAYMELSSLRSEDTAVYYCARSNYYGSSYWFFDVWGTGTTVTVSSTREQKLISEEDLAKPTTTPAPRPPTPAPTIASQPLSLRPEACRPAAGGAVHTRGLDFACDIYIWAPLAGTCGVLLLSLVITLYCGRARVKFSRSADAPAYQQGQNQLYNELNLGRREEYDVLDKRRGRDPEMGGKPRRKNPQEGLYNELQKDKMAEAYSEIGMKGERRRGKGHDGLYQGLSTATKDTYDALHMQALPPRSRGSGATNFSLLKQAGDVEENPGPGIHMATYEVLCEVARKLGTDDREVVLFLLNVFIPQPTLAQLIGALRALKEEGRLTFPLLAECLFRAGRRDLLRDLLHLDPRFLERHLAGTMSYFSPYQLTVLHVDGELCARDIRSLIFLSKDTIGSRSTPQTFLHWVYCMENLDLLGPTDVDALMSMLRSLSRVDLQRQVQTLMGLHLSGPSHSQHYRHTPLETDFYDYKDDDDKTSGSGEGRGSLLTCGDVEENPGPHMTEYKPTVRLATRDDVPRAVRTLAAAFADYPATRHTVDPDRHIERVTELQELFLTRVGLDIGKVWVADDGAAVAVWTTPESVEAGAVFAEIGPRMAELSGSRLAAQQQMEGLLAPHRPKEPAWFLATVGVSPDHQGKGLGSAVVLPGVEAAERAGVPAFLETSAPRNLPFYERLGFTVTADVEVPEGPRTWCMTRKPGA

SEQ ID NO: 2712 - protein, 919 aa, Artificial Sequence
  Synthetic Polypeptide
MALPVTALLLPLALLLHAARPEIVLTQSPATLSLSPGERATLSCRASQSVSSYLAWYQQKPGQAPRLLIYDASNRATGIPARFSGSGSGTDFTLTISSLEPEDFAVYYCQQRSDWPLTFGGGTKVEIKGGGGSGGGGSGGGGSEVQLVQSGGGLVHPGGSLRLSCTGSGFTFSYHAMHWVRQAPGKGLEWVSIIGTGGVTYYADSVKGRFTISRDNVKNSLYLQMNSLRAEDMAVYYCARDYYGAGSFYDGLYGMDVWGQGTTVTVSSTREQKLISEEDLAKPTTTPAPRPPTPAPTIASQPLSLRPEACRPAAGGAVHTRGLDFACDIYIWAPLAGTCGVLLLSLVITLYCGRARVKFSRSADAPAYQQGQNQLYNELNLGRREEYDVLDKRRGRDPEMGGKPRRKNPQEGLYNELQKDKMAEAYSEIGMKGERRRGKGHDGLYQGLSTATKDTYDALHMQALPPRSRGSGATNFSLLKQAGDVEENPGPGIHMATYEVLCEVARKLGTDDREVVLFLLNVFIPQPTLAQLIGALRALKEEGRLTFPLLAECLFRAGRRDLLRDLLHLDPRFLERHLAGTMSYFSPYQLTVLHVDGELCARDIRSLIFLSKDTIGSRSTPQTFLHWVYCMENLDLLGPTDVDALMSMLRSLSRVDLQRQVQTLMGLHLSGPSHSQHYRHTPLETDFYDYKDDDDKTSGSGEGRGSLLTCGDVEENPGPHMTEYKPTVRLATRDDVPRAVRTLAAAFADYPATRHTVDPDRHIERVTELQELFLTRVGLDIGKVWVADDGAAVAVWTTPESVEAGAVFAEIGPRMAELSGSRLAAQQQMEGLLAPHRPKEPAWFLATVGVSPDHQGKGLGSAVVLPGVEAAERAGVPAFLETSAPRNLPFYERLGFTVTADVEVPEGPRTWCMTRKPGA

SEQ ID NO: 2713 - protein, 917 aa, Artificial Sequence
  Synthetic Polypeptide
MALPVTALLLPLALLLHAARPEIVLTQSPATLSLSPGERATLSCRASQSVSSYLAWYQQKPGQAPRLLIYDASNRATGIPARFSGSGSGTDFTLTISSLEPEDFAVYYCQQRSNWPLTFGGGTKVEIKGGGGSGGGGSGGGGSAVQLVESGGGLVQPGRSLRLSCAASGFTFGDYTMHWVRQAPGKGLEWVSGISWNSGSIGYADSVKGRFTISRDNAKNSLYLQMNSLRAEDTALYYCTKDNQYGSGSTYGLGVWGQGTLVTVSSTREQKLISEEDLAKPTTTPAPRPPTPAPTIASQPLSLRPEACRPAAGGAVHTRGLDFACDIYIWAPLAGTCGVLLLSLVITLYCGRARVKFSRSADAPAYQQGQNQLYNELNLGRREEYDVLDKRRGRDPEMGGKPRRKNPQEGLYNELQKDKMAEAYSEIGMKGERRRGKGHDGLYQGLSTATKDTYDALHMQALPPRSRGSGATNFSLLKQAGDVEENPGPGIHMATYEVLCEVARKLGTDDREVVLFLLNVFIPQPTLAQLIGALRALKEEGRLTFPLLAECLFRAGRRDLLRDLLHLDPRFLERHLAGTMSYFSPYQLTVLHVDGELCARDIRSLIFLSKDTIGSRSTPQTFLHWVYCMENLDLLGPTDVDALMSMLRSLSRVDLQRQVQTLMGLHLSGPSHSQHYRHTPLETDFYDYKDDDDKTSGSGEGRGSLLTCGDVEENPGPHMTEYKPTVRLATRDDVPRAVRTLAAAFADYPATRHTVDPDRHIERVTELQELFLTRVGLDIGKVWVADDGAAVAVWTTPESVEAGAVFAEIGPRMAELSGSRLAAQQQMEGLLAPHRPKEPAWFLATVGVSPDHQGKGLGSAVVLPGVEAAERAGVPAFLETSAPRNLPFYERLGFTVTADVEVPEGPRTWCMTRKPGA

SEQ ID NO: 2714 - protein, 916 aa, Artificial Sequence
  Synthetic Polypeptide
MALPVTALLLPLALLLHAARPDIQMTQSPSSLSASVGDRVTITCRASSSVSYMHWYQQKPGKAPKPLIYAPSNLASGVPSRFSGSGSGTDFTLTISSLQPEDFATYYCQQWSFNPPTFGQGTKVEIKRGGGGSGGGGSGGGGSEVQLVESGGGLVQPGGSLRLSCAASGYTFTSYNMHWVRQAPGKGLEWVGAIYPGNGDTSYNQKFKGRFTISVDKSKNTLYLQMNSLRAEDTAVYYCARVVYYSNSYWYFDVWGQGTLVTVSSTREQKLISEEDLAKPTTTPAPRPPTPAPTIASQPLSLRPEACRPAAGGAVHTRGLDFACDIYIWAPLAGTCGVLLLSLVITLYCGRARVKFSRSADAPAYQQGQNQLYNELNLGRREEYDVLDKRRGRDPEMGGKPRRKNPQEGLYNELQKDKMAEAYSEIGMKGERRRGKGHDGLYQGLSTATKDTYDALHMQALPPRSRGSGATNFSLLKQAGDVEENPGPGIHMATYEVLCEVARKLGTDDREVVLFLLNVFIPQPTLAQLIGALRALKEEGRLTFPLLAECLFRAGRRDLLRDLLHLDPRFLERHLAGTMSYFSPYQLTVLHVDGELCARDIRSLIFLSKDTIGSRSTPQTFLHWVYCMENLDLLGPTDVDALMSMLRSLSRVDLQRQVQTLMGLHLSGPSHSQHYRHTPLETDFYDYKDDDDKTSGSGEGRGSLLTCGDVEENPGPHMTEYKPTVRLATRDDVPRAVRTLAAAFADYPATRHTVDPDRHIERVTELQELFLTRVGLDIGKVWVADDGAAVAVWTTPESVEAGAVFAEIGPRMAELSGSRLAAQQQMEGLLAPHRPKEPAWFLATVGVSPDHQGKGLGSAVVLPGVEAAERAGVPAFLETSAPRNLPFYERLGFTVTADVEVPEGPRTWCMTRKPGA

SEQ ID NO: 2715 - protein, 914 aa, Artificial Sequence
  Synthetic Polypeptide
MALPVTALLLPLALLLHAARPDIQLTQSPSSLSASVGDRVTMTCRASSSVSYIHWFQQKPGKAPKPWIYATSNLASGVPVRFSGSGSGTDYTFTISSLQPEDIATYYCQQWTSNPPTFGGGTKLEIKGGGGSGGGGSGGGGSQVQLQQSGAEVKKPGSSVKVSCKASGYTFTSYNMHWVKQAPGQGLEWIGAIYPGNGDTSYNQKFKGKATLTADESTNTAYMELSSLRSEDTAFYYCARSTYYGGDWYFDVWGQGTTVTVSSTREQKLISEEDLAKPTTTPAPRPPTPAPTIASQPLSLRPEACRPAAGGAVHTRGLDFACDIYIWAPLAGTCGVLLLSLVITLYCGRARVKFSRSADAPAYQQGQNQLYNELNLGRREEYDVLDKRRGRDPEMGGKPRRKNPQEGLYNELQKDKMAEAYSEIGMKGERRRGKGHDGLYQGLSTATKDTYDALHMQALPPRSRGSGATNFSLLKQAGDVEENPGPGIHMATYEVLCEVARKLGTDDREVVLFLLNVFIPQPTLAQLIGALRALKEEGRLTFPLLAECLFRAGRRDLLRDLLHLDPRFLERHLAGTMSYFSPYQLTVLHVDGELCARDIRSLIFLSKDTIGSRSTPQTFLHWVYCMENLDLLGPTDVDALMSMLRSLSRVDLQRQVQTLMGLHLSGPSHSQHYRHTPLETDFYDYKDDDDKTSGSGEGRGSLLTCGDVEENPGPHMTEYKPTVRLATRDDVPRAVRTLAAAFADYPATRHTVDPDRHIERVTELQELFLTRVGLDIGKVWVADDGAAVAVWTTPESVEAGAVFAEIGPRMAELSGSRLAAQQQMEGLLAPHRPKEPAWFLATVGVSPDHQGKGLGSAVVLPGVEAAERAGVPAFLETSAPRNLPFYERLGFTVTADVEVPEGPRTWCMTRKPGA

SEQ ID NO: 2716 - protein, 926 aa, Artificial Sequence
  Synthetic Polypeptide
MALPVTALLLPLALLLHAARPSTVMTQSPDSLAVSLGERATINCKSSQSNSNDVAWYQQKPGQSPKVLIYFASNRYSGVPDRFSGSGYGTDFTLTISSLQAEDVAVYFCQQDYSSPLTFGAGTKLELKRADAGGGGSGGGGSGGGGSQIQLVQSGSELKKPGASVKVSCKASGYTFTNFGVNWVRQAPGKGLEWMGWINTYTGEPSYAQGFTGRFVFSLDASVSTAYLQISSLKAEDTATYFCTRRTNYYGTSYYYAMDYWGQGTTVTVSSAKTTTREQKLISEEDLAKPTTTPAPRPPTPAPTIASQPLSLRPEACRPAAGGAVHTRGLDFACDIYIWAPLAGTCGVLLLSLVITLYCGRARVKFSRSADAPAYQQGQNQLYNELNLGRREEYDVLDKRRGRDPEMGGKPRRKNPQEGLYNELQKDKMAEAYSEIGMKGERRRGKGHDGLYQGLSTATKDTYDALHMQALPPRSRGSGATNFSLLKQAGDVEENPGPGIHMATYEVLCEVARKLGTDDREVVLFLLNVFIPQPTLAQLIGALRALKEEGRLTFPLLAECLFRAGRRDLLRDLLHLDPRFLERHLAGTMSYFSPYQLTVLHVDGELCARDIRSLIFLSKDTIGSRSTPQTFLHWVYCMENLDLLGPTDVDALMSMLRSLSRVDLQRQVQTLMGLHLSGPSHSQHYRHTPLETDFYDYKDDDDKTSGSGEGRGSLLTCGDVEENPGPHMTEYKPTVRLATRDDVPRAVRTLAAAFADYPATRHTVDPDRHIERVTELQELFLTRVGLDIGKVWVADDGAAVAVWTTPESVEAGAVFAEIGPRMAELSGSRLAAQQQMEGLLAPHRPKEPAWFLATVGVSPDHQGKGLGSAVVLPGVEAAERAGVPAFLETSAPRNLPFYERLGFTVTADVEVPEGPRTWCMTRKPGA

SEQ ID NO: 2717 - protein, 918 aa, Artificial Sequence
  Synthetic Polypeptide
MALPVTALLLPLALLLHAARPQIVLSQSPAILSASPGEKVTMTCRASSSVSYMHWYQQKPGSSPKPWIYATSNLASGVPARFSGSGSGTSYSFTISRVEAEDAATYYCQQWTFNPPTFGGGTRLEIKRTVAAGGGGSGGGGSGGGGSQAYLQQSGAELVRPGASVKMSCKASGYTFTSYNMHWVKQTPRQGLEWIGGIYPGNGDTSYNQKFKGKATLTVGKSSSTAYMQLSSLTSEDSAVYFCARYDYNYAMDYWGQGTSVTVSSASTREQKLISEEDLAKPTTTPAPRPPTPAPTIASQPLSLRPEACRPAAGGAVHTRGLDFACDIYIWAPLAGTCGVLLLSLVITLYCGRARVKFSRSADAPAYQQGQNQLYNELNLGRREEYDVLDKRRGRDPEMGGKPRRKNPQEGLYNELQKDKMAEAYSEIGMKGERRRGKGHDGLYQGLSTATKDTYDALHMQALPPRSRGSGATNFSLLKQAGDVEENPGPGIHMATYEVLCEVARKLGTDDREVVLFLLNVFIPQPTLAQLIGALRALKEEGRLTFPLLAECLFRAGRRDLLRDLLHLDPRFLERHLAGTMSYFSPYQLTVLHVDGELCARDIRSLIFLSKDTIGSRSTPQTFLHWVYCMENLDLLGPTDVDALMSMLRSLSRVDLQRQVQTLMGLHLSGPSHSQHYRHTPLETDFYDYKDDDDKTSGSGEGRGSLLTCGDVEENPGPHMTEYKPTVRLATRDDVPRAVRTLAAAFADYPATRHTVDPDRHIERVTELQELFLTRVGLDIGKVWVADDGAAVAVWTTPESVEAGAVFAEIGPRMAELSGSRLAAQQQMEGLLAPHRPKEPAWFLATVGVSPDHQGKGLGSAVVLPGVEAAERAGVPAFLETSAPRNLPFYERLGFTVTADVEVPEGPRTWCMTRKPGA

SEQ ID NO: 2718 - protein, 916 aa, Artificial Sequence; identical to SEQ ID NO: 2714
  Synthetic Polypeptide

SEQ ID NO: 2719 - protein, 915 aa, Artificial Sequence
  Synthetic Polypeptide
MALPVTALLLPLALLLHAARPEIVLTQSPSSLSASVGDRVTITCRASSSLSFMHWYQQKPGKAPKPWIYATSNLASGVPSRFSGSGSGTDYTLTISSLQPEDFATYFCHQWSSNPLTFGGGTKVEIKGGGGSGGGGSGGGGSQVQLVQSGAEVKKPGASVKVSCKASGYTFTSYNMHWVRQAPGQRLEWIGAIYPGNGDTSYNQKFKGRVTVTRDTSANTAYMELSSLKSEDTAVYYCARSHYGSNYVDYFDYWGQGTLVTVSSTREQKLISEEDLAKPTTTPAPRPPTPAPTIASQPLSLRPEACRPAAGGAVHTRGLDFACDIYIWAPLAGTCGVLLLSLVITLYCGRARVKFSRSADAPAYQQGQNQLYNELNLGRREEYDVLDKRRGRDPEMGGKPRRKNPQEGLYNELQKDKMAEAYSEIGMKGERRRGKGHDGLYQGLSTATKDTYDALHMQALPPRSRGSGATNFSLLKQAGDVEENPGPGIHMATYEVLCEVARKLGTDDREVVLFLLNVFIPQPTLAQLIGALRALKEEGRLTFPLLAECLFRAGRRDLLRDLLHLDPRFLERHLAGTMSYFSPYQLTVLHVDGELCARDIRSLIFLSKDTIGSRSTPQTFLHWVYCMENLDLLGPTDVDALMSMLRSLSRVDLQRQVQTLMGLHLSGPSHSQHYRHTPLETDFYDYKDDDDKTSGSGEGRGSLLTCGDVEENPGPHMTEYKPTVRLATRDDVPRAVRTLAAAFADYPATRHTVDPDRHIERVTELQELFLTRVGLDIGKVWVADDGAAVAVWTTPESVEAGAVFAEIGPRMAELSGSRLAAQQQMEGLLAPHRPKEPAWFLATVGVSPDHQGKGLGSAVVLPGVEAAERAGVPAFLETSAPRNLPFYERLGFTVTADVEVPEGPRTWCMTRKPGA

SEQ ID NO: 2720 - protein, 917 aa, Artificial Sequence
  Synthetic Polypeptide
MALPVTALLLPLALLLHAARPDEIVLTQSPATLSLSPGERATLSCRASQSVSSYLAWYQQKPGQAPRLLIYDASNRATGIPARFSGSGSGTDFTLTISSLEPEDFAVYYCQQRSNWPITFGQGTRLEIKGGGGSGGGGSGGGGSEVQLVESGGGLVQPDRSLRLSCAASGFTFHDYAMHWVRQAPGKGLEWVSTISWNSGTIGYADSVKGRFTISRDNAKNSLYLQMNSLRAEDTALYYCAKDIQYGNYYYGMDVWGQGTTVTVSSTREQKLISEEDLAKPTTTPAPRPPTPAPTIASQPLSLRPEACRPAAGGAVHTRGLDFACDIYIWAPLAGTCGVLLLSLVITLYCGRARVKFSRSADAPAYQQGQNQLYNELNLGRREEYDVLDKRRGRDPEMGGKPRRKNPQEGLYNELQKDKMAEAYSEIGMKGERRRGKGHDGLYQGLSTATKDTYDALHMQALPPRSRGSGATNFSLLKQAGDVEENPGPGIHMATYEVLCEVARKLGTDDREVVLFLLNVFIPQPTLAQLIGALRALKEEGRLTFPLLAECLFRAGRRDLLRDLLHLDPRFLERHLAGTMSYFSPYQLTVLHVDGELCARDIRSLIFLSKDTIGSRSTPQTFLHWVYCMENLDLLGPTDVDALMSMLRSLSRVDLQRQVQTLMGLHLSGPSHSQHYRHTPLETDFYDYKDDDDKTSGSGEGRGSLLTCGDVEENPGPHMTEYKPTVRLATRDDVPRAVRTLAAAFADYPATRHTVDPDRHIERVTELQELFLTRVGLDIGKVWVADDGAAVAVWTTPESVEAGAVFAEIGPRMAELSGSRLAAQQQMEGLLAPHRPKEPAWFLATVGVSPDHQGKGLGSAVVLPGVEAAERAGVPAFLETSAPRNLPFYERLGFTVTADVEVPEGPRTWCMTRKPGA

SEQ ID NO: 2721 - protein, 915 aa, Artificial Sequence
  Synthetic Polypeptide
MALPVTALLLPLALLLHAARPEIVLTQSPGTLSLSPGERATLSCRASSSVPYIHWYQQKPGQAPRLLIYATSALASGIPDRFSGSGSGTDFTLTISRLEPEDFAVYYCQQWLSNPPTFGQGTKLELKRGGGGSGGGGSGGGGSEVQLVQSGAEVKKPGESLKLSCKGSGRTFTSYNMHWVRQMPGKGLEWMGAIYPLTGDTSYNQKSKLQVTISADKSISTAYLQWSSLKASDTAMYYCARSTYVGGDWQFDVWGKGTTVTVSSTREQKLISEEDLAKPTTTPAPRPPTPAPTIASQPLSLRPEACRPAAGGAVHTRGLDFACDIYIWAPLAGTCGVLLLSLVITLYCGRARVKFSRSADAPAYQQGQNQLYNELNLGRREEYDVLDKRRGRDPEMGGKPRRKNPQEGLYNELQKDKMAEAYSEIGMKGERRRGKGHDGLYQGLSTATKDTYDALHMQALPPRSRGSGATNFSLLKQAGDVEENPGPGIHMATYEVLCEVARKLGTDDREVVLFLLNVFIPQPTLAQLIGALRALKEEGRLTFPLLAECLFRAGRRDLLRDLLHLDPRFLERHLAGTMSYFSPYQLTVLHVDGELCARDIRSLIFLSKDTIGSRSTPQTFLHWVYCMENLDLLGPTDVDALMSMLRSLSRVDLQRQVQTLMGLHLSGPSHSQHYRHTPLETDFYDYKDDDDKTSGSGEGRGSLLTCGDVEENPGPHMTEYKPTVRLATRDDVPRAVRTLAAAFADYPATRHTVDPDRHIERVTELQELFLTRVGLDIGKVWVADDGAAVAVWTTPESVEAGAVFAEIGPRMAELSGSRLAAQQQMEGLLAPHRPKEPAWFLATVGVSPDHQGKGLGSAVVLPGVEAAERAGVPAFLETSAPRNLPFYERLGFTVTADVEVPEGPRTWCMTRKPGA

SEQ ID NO: 2722 - protein, 920 aa, Artificial Sequence
  Synthetic Polypeptide
MALPVTALLLPLALLLHAARPDIQMTQSPSSLSASVGDRVTITCRSSQSIVHSVGNTFLEWYQQKPGKAPKLLIYKVSNRFSGVPSRFSGSGSGTDFTLTISSLQPEDFATYYCFQGSQFPYTFGQGTKVEIKRGGGGSGGGGSGGGGSEVQLVESGGGLVQPGGSLRLSCAASGYEFSRSWMNWVRQAPGKGLEWVGRIYPGDGDTNYSGKFKGRFTISADTSKNTAYLQMNSLRAEDTAVYYCARDGSSWDWYFDVWGQGTLVTVSSTREQKLISEEDLAKPTTTPAPRPPTPAPTIASQPLSLRPEACRPAAGGAVHTRGLDFACDIYIWAPLAGTCGVLLLSLVITLYCGRARVKFSRSADAPAYQQGQNQLYNELNLGRREEYDVLDKRRGRDPEMGGKPRRKNPQEGLYNELQKDKMAEAYSEIGMKGERRRGKGHDGLYQGLSTATKDTYDALHMQALPPRSRGSGATNFSLLKQAGDVEENPGPGIHMATYEVLCEVARKLGTDDREVVLFLLNVFIPQPTLAQLIGALRALKEEGRLTFPLLAECLFRAGRRDLLRDLLHLDPRFLERHLAGTMSYFSPYQLTVLHVDGELCARDIRSLIFLSKDTIGSRSTPQTFLHWVYCMENLDLLGPTDVDALMSMLRSLSRVDLQRQVQTLMGLHLSGPSHSQHYRHTPLETDFYDYKDDDDKTSGSGEGRGSLLTCGDVEENPGPHMTEYKPTVRLATRDDVPRAVRTLAAAFADYPATRHTVDPDRHIERVTELQELFLTRVGLDIGKVWVADDGAAVAVWTTPESVEAGAVFAEIGPRMAELSGSRLAAQQQMEGLLAPHRPKEPAWFLATVGVSPDHQGKGLGSAVVLPGVEAAERAGVPAFLETSAPRNLPFYERLGFTVTADVEVPEGPRTWCMTRKPGA

SEQ ID NO: 2723 - protein, 912 aa, Artificial Sequence
  Synthetic Polypeptide
MALPVTALLLPLALLLHAARPDIVMTQSPSSLSASVGDRVTITCKASQSVTNDVAWYQQKPGKAPKLLIYYASNRYTGVPSRFSGSGSGTDFTLTISSLQPEDFATYYCQQDYRSPWTFGGGTKVEIKRGGGGSGGGGSGGGGSQVQLEESGGGVVRPGRSLRLSCAASGFTFSDYGVNWIRQAPGKGLEWVTIIWGDGRTDYNSALKSRFTVSRNNSNNTLSLQMNSLTTEDTAVYYCVRAPGNRAMEYWGQGVLVTVSSTREQKLISEEDLAKPTTTPAPRPPTPAPTIASQPLSLRPEACRPAAGGAVHTRGLDFACDIYIWAPLAGTCGVLLLSLVITLYCGRARVKFSRSADAPAYQQGQNQLYNELNLGRREEYDVLDKRRGRDPEMGGKPRRKNPQEGLYNELQKDKMAEAYSEIGMKGERRRGKGHDGLYQGLSTATKDTYDALHMQALPPRSRGSGATNFSLLKQAGDVEENPGPGIHMATYEVLCEVARKLGTDDREVVLFLLNVFIPQPTLAQLIGALRALKEEGRLTFPLLAECLFRAGRRDLLRDLLHLDPRFLERHLAGTMSYFSPYQLTVLHVDGELCARDIRSLIFLSKDTIGSRSTPQTFLHWVYCMENLDLLGPTDVDALMSMLRSLSRVDLQRQVQTLMGLHLSGPSHSQHYRHTPLETDFYDYKDDDDKTSGSGEGRGSLLTCGDVEENPGPHMTEYKPTVRLATRDDVPRAVRTLAAAFADYPATRHTVDPDRHIERVTELQELFLTRVGLDIGKVWVADDGAAVAVWTTPESVEAGAVFAEIGPRMAELSGSRLAAQQQMEGLLAPHRPKEPAWFLATVGVSPDHQGKGLGSAVVLPGVEAAERAGVPAFLETSAPRNLPFYERLGFTVTADVEVPEGPRTWCMTRKPGA

SEQ ID NO: 2724 - protein, 918 aa, Artificial Sequence
  Synthetic Polypeptide
MALPVTALLLPLALLLHAARPDIQMTQSPSSLSASVGDRVTITCRASQTIWSYLNWYQQRPGKAPNLLIYAASSLQSGVPSRFSGRGSGTDFTLTISSLQAEDFATYYCQQSYSIPQIFGQGTKLEIKGGGGSGGGGSGGGGSQVQLQQSGPGLVKPSQTLSLTCAISGDSVSSNSAAWNWIRQSPSRGLEWLGRTYYRSKWYNDYAVSVKSRITINPDTSKNQFSLQLNSVTPEDTAVYYCAREVTGDLEDAFDIWGQGTMVTVSSTREQKLISEEDLAKPTTTPAPRPPTPAPTIASQPLSLRPEACRPAAGGAVHTRGLDFACDIYIWAPLAGTCGVLLLSLVITLYCGRARVKFSRSADAPAYQQGQNQLYNELNLGRREEYDVLDKRRGRDPEMGGKPRRKNPQEGLYNELQKDKMAEAYSEIGMKGERRRGKGHDGLYQGLSTATKDTYDALHMQALPPRSRGSGATNFSLLKQAGDVEENPGPGIHMATYEVLCEVARKLGTDDREVVLFLLNVFIPQPTLAQLIGALRALKEEGRLTFPLLAECLFRAGRRDLLRDLLHLDPRFLERHLAGTMSYFSPYQLTVLHVDGELCARDIRSLIFLSKDTIGSRSTPQTFLHWVYCMENLDLLGPTDVDALMSMLRSLSRVDLQRQVQTLMGLHLSGPSHSQHYRHTPLETDFYDYKDDDDKTSGSGEGRGSLLTCGDVEENPGPHMTEYKPTVRLATRDDVPRAVRTLAAAFADYPATRHTVDPDRHIERVTELQELFLTRVGLDIGKVWVADDGAAVAVWTTPESVEAGAVFAEIGPRMAELSGSRLAAQQQMEGLLAPHRPKEPAWFLATVGVSPDHQGKGLGSAVVLPGVEAAERAGVPAFLETSAPRNLPFYERLGFTVTADVEVPEGPRTWCMTRKPGA

SEQ ID NO: 2725 - protein, 918 aa, Artificial Sequence
  Synthetic Polypeptide
MALPVTALLLPLALLLHAARPQVQLQQSGPGLVKPSQTLSLTCAISGDSVSSNSAAWNWIRQSPSRGLEWLGRTYYRSKWYNDYAVSVKSRITINPDTSKNQFSLQLNSVTPEDTAVYYCAREVTGDLEDAFDIWGQGTMVTVSSGGGGSGGGGSGGGGSDIQMTQSPSSLSASVGDRVTITCRASQTIWSYLNWYQQRPGKAPNLLIYAASSLQSGVPSRFSGRGSGTDFTLTISSLQAEDFATYYCQQSYSIPQIFGQGTKLEIKTREQKLISEEDLAKPTTTPAPRPPTPAPTIASQPLSLRPEACRPAAGGAVHTRGLDFACDIYIWAPLAGTCGVLLLSLVITLYCGRARVKFSRSADAPAYQQGQNQLYNELNLGRREEYDVLDKRRGRDPEMGGKPRRKNPQEGLYNELQKDKMAEAYSEIGMKGERRRGKGHDGLYQGLSTATKDTYDALHMQALPPRSRGSGATNFSLLKQAGDVEENPGPGIHMATYEVLCEVARKLGTDDREVVLFLLNVFIPQPTLAQLIGALRALKEEGRLTFPLLAECLFRAGRRDLLRDLLHLDPRFLERHLAGTMSYFSPYQLTVLHVDGELCARDIRSLIFLSKDTIGSRSTPQTFLHWVYCMENLDLLGPTDVDALMSMLRSLSRVDLQRQVQTLMGLHLSGPSHSQHYRHTPLETDFYDYKDDDDKTSGSGEGRGSLLTCGDVEENPGPHMTEYKPTVRLATRDDVPRAVRTLAAAFADYPATRHTVDPDRHIERVTELQELFLTRVGLDIGKVWVADDGAAVAVWTTPESVEAGAVFAEIGPRMAELSGSRLAAQQQMEGLLAPHRPKEPAWFLATVGVSPDHQGKGLGSAVVLPGVEAAERAGVPAFLETSAPRNLPFYERLGFTVTADVEVPEGPRTWCMTRKPGA

SEQ ID NO: 2726 - protein, 911 aa, Artificial Sequence
  Synthetic Polypeptide
MALPVTALLLPLALLLHAARPDIQMTQSPATIENTSLSASVGDRVTITCRASQGISSWLTWYQQKPEKAPKSLIYAASSLQSGVPSRFSGSGSGTDFTLTISSLQPEDFATYYCQQYDSYPITFGQGTRLEIKGGGGSGGGGSGGGGSQVQLQQWGAGLLKPSETLSLTCAVYGGSFSAYYWSWIRQPPGKGLEWIGDINHGGGTNYNPSLKSRVTISVDTSKNQFSLKLNSVTAADTAVYYCASLTAYWGQGSLVTVSSTREQKLISEEDLAKPTTTPAPRPPTPAPTIASQPLSLRPEACRPAAGGAVHTRGLDFACDIYIWAPLAGTCGVLLLSLVITLYCGRARVKFSRSADAPAYQQGQNQLYNELNLGRREEYDVLDKRRGRDPEMGGKPRRKNPQEGLYNELQKDKMAEAYSEIGMKGERRRGKGHDGLYQGLSTATKDTYDALHMQALPPRSRGSGATNFSLLKQAGDVEENPGPGIHMATYEVLCEVARKLGTDDREVVLFLLNVFIPQPTLAQLIGALRALKEEGRLTFPLLAECLFRAGRRDLLRDLLHLDPRFLERHLAGTMSYFSPYQLTVLHVDGELCARDIRSLIFLSKDTIGSRSTPQTFLHWVYCMENLDLLGPTDVDALMSMLRSLSRVDLQRQVQTLMGLHLSGPSHSQHYRHTPLETDFYDYKDDDDKTSGSGEGRGSLLTCGDVEENPGPHMTEYKPTVRLATRDDVPRAVRTLAAAFADYPATRHTVDPDRHIERVTELQELFLTRVGLDIGKVWVADDGAAVAVWTTPESVEAGAVFAEIGPRMAELSGSRLAAQQQMEGLLAPHRPKEPAWFLATVGVSPDHQGKGLGSAVVLPGVEAAERAGVPAFLETSAPRNLPFYERLGFTVTADVEVPEGPRTWCMTRKPGA

SEQ ID NO: 2727 - protein, 916 aa, Artificial Sequence
  Synthetic Polypeptide
MALPVTALLLPLALLLHAARPDEIVLTQSPDSLAVSLGERATINCKASQSVDFDGDSYLNWYQQKPGQPPKVLIYAASTLQSGVPSRFSGSGSGTDFTLTINSLEAEDAATYYCQQSNEDPWTFGGGTKVEIKGGGGSGGGGSGGGGSQVQLVQSGAEVKKPGASVKVSCKVSGYTFTDYYITWVRQAPGQALEWMGWIYPGSGNTKYSQKFQGRFVFSVDTSASTAYLQLSSLKAEDTAVYYCANYGNYWFAYWGQGTLVTVSSTREQKLISEEDLAKPTTTPAPRPPTPAPTIASQPLSLRPEACRPAAGGAVHTRGLDFACDIYIWAPLAGTCGVLLLSLVITLYCGRARVKFSRSADAPAYQQGQNQLYNELNLGRREEYDVLDKRRGRDPEMGGKPRRKNPQEGLYNELQKDKMAEAYSEIGMKGERRRGKGHDGLYQGLSTATKDTYDALHMQALPPRSRGSGATNFSLLKQAGDVEENPGPGIHMATYEVLCEVARKLGTDDREVVLFLLNVFIPQPTLAQLIGALRALKEEGRLTFPLLAECLFRAGRRDLLRDLLHLDPRFLERHLAGTMSYFSPYQLTVLHVDGELCARDIRSLIFLSKDTIGSRSTPQTFLHWVYCMENLDLLGPTDVDALMSMLRSLSRVDLQRQVQTLMGLHLSGPSHSQHYRHTPLETDFYDYKDDDDKTSGSGEGRGSLLTCGDVEENPGPHMTEYKPTVRLATRDDVPRAVRTLAAAFADYPATRHTVDPDRHIERVTELQELFLTRVGLDIGKVWVADDGAAVAVWTTPESVEAGAVFAEIGPRMAELSGSRLAAQQQMEGLLAPHRPKEPAWFLATVGVSPDHQGKGLGSAVVLPGVEAAERAGVPAFLETSAPRNLPFYERLGFTVTADVEVPEGPRTWCMTRKPGA

SEQ ID NO: 2728 - protein, 913 aa, Artificial Sequence
  Synthetic Polypeptide
MALPVTALLLPLALLLHAARPDIQMTQSPSSLSASVGDRVTITCRASQGISSWLAWYQQKPEKAPKSLIYAASSLQSGVPSRFSGSGSGTDFTLTISSLQPEDFATYYCQQYNSYPPTFGGGTKVEIKGGGGSGGGGSGGGGSEVQLVQSGGGLVHPGGSLRLSCAGSGFAFSSSTMHWIRQAPGKGLEWISLIGSGGGIYYGDSVKGRFTISRDNAKNSLYLQMNSLRAEDMAVYYCVRGYFDWVDYFDYWGQGTLVTVSSTREQKLISEEDLAKPTTTPAPRPPTPAPTIASQPLSLRPEACRPAAGGAVHTRGLDFACDIYIWAPLAGTCGVLLLSLVITLYCGRARVKFSRSADAPAYQQGQNQLYNELNLGRREEYDVLDKRRGRDPEMGGKPRRKNPQEGLYNELQKDKMAEAYSEIGMKGERRRGKGHDGLYQGLSTATKDTYDALHMQALPPRSRGSGATNFSLLKQAGDVEENPGPGIHMATYEVLCEVARKLGTDDREVVLFLLNVFIPQPTLAQLIGALRALKEEGRLTFPLLAECLFRAGRRDLLRDLLHLDPRFLERHLAGTMSYFSPYQLTVLHVDGELCARDIRSLIFLSKDTIGSRSTPQTFLHWVYCMENLDLLGPTDVDALMSMLRSLSRVDLQRQVQTLMGLHLSGPSHSQHYRHTPLETDFYDYKDDDDKTSGSGEGRGSLLTCGDVEENPGPHMTEYKPTVRLATRDDVPRAVRTLAAAFADYPATRHTVDPDRHIERVTELQELFLTRVGLDIGKVWVADDGAAVAVWTTPESVEAGAVFAEIGPRMAELSGSRLAAQQQMEGLLAPHRPKEPAWFLATVGVSPDHQGKGLGSAVVLPGVEAAERAGVPAFLETSAPRNLPFYERLGFTVTADVEVPEGPRTWCMTRKPGA

SEQ ID NO: 2729 - protein, 923 aa, Artificial Sequence
  Synthetic Polypeptide
MALPVTALLLPLALLLHAARPDDIVMTQSPDSLTVSLGERTTINCKSSQSVLDSSKNKNSLAWYQQKPGQPPKLLLSWASTRESGIPDRFSGSGSGTDFTLTIDSLQPEDSATYYCQQSAHFPITFGQGTRLEIKGGGGSGGGGSGGGGSQVQLVQSGAEVKKPGASVKVSCKASGYTFTNYGMNWVKQAPGQGLKWMGWINTYTGEPTYADDFKGRVTMTSDTSTSTAYLELHNLRSDDTAVYYCARWSWSDGYYVYFDYWGQGTTVTVSSTREQKLISEEDLAKPTTTPAPRPPTPAPTIASQPLSLRPEACRPAAGGAVHTRGLDFACDIYIWAPLAGTCGVLLLSLVITLYCGRARVKFSRSADAPAYQQGQNQLYNELNLGRREEYDVLDKRRGRDPEMGGKPRRKNPQEGLYNELQKDKMAEAYSEIGMKGERRRGKGHDGLYQGLSTATKDTYDALHMQALPPRSRGSGATNFSLLKQAGDVEENPGPGIHMATYEVLCEVARKLGTDDREVVLFLLNVFIPQPTLAQLIGALRALKEEGRLTFPLLAECLFRAGRRDLLRDLLHLDPRFLERHLAGTMSYFSPYQLTVLHVDGELCARDIRSLIFLSKDTIGSRSTPQTFLHWVYCMENLDLLGPTDVDALMSMLRSLSRVDLQRQVQTLMGLHLSGPSHSQHYRHTPLETDFYDYKDDDDKTSGSGEGRGSLLTCGDVEENPGPHMTEYKPTVRLATRDDVPRAVRTLAAAFADYPATRHTVDPDRHIERVTELQELFLTRVGLDIGKVWVADDGAAVAVWTTPESVEAGAVFAEIGPRMAELSGSRLAAQQQMEGLLAPHRPKEPAWFLATVGVSPDHQGKGLGSAVVLPGVEAAERAGVPAFLETSAPRNLPFYERLGFTVTADVEVPEGPRTWCMTRKPGA

SEQ ID NO: 2730 - protein, 919 aa, Artificial Sequence
  Synthetic Polypeptide
MALPVTALLLPLALLLHAARPDEIVLTQSPGSLAVSPGERVTMSCKSSQSVFFSSSQKNYLAWYQQIPGQSPRLLIYWASTRESGVPDRFTGSGSGTDFTLTISSVQPEDLAIYYCHQYLSSRTFGQGTKLEIKRGGGGSGGGGSGGGGSQVQLQQPGAEVVKPGASVKMSCKASGYTFTSYYIHWIKQTPGQGLEWVGVIYPGNDDISYNQKFQGKATLTADKSSTTAYMQLSSLTSEDSAVYYCAREVRLRYFDVWGQGTTVTVSSTREQKLISEEDLAKPTTTPAPRPPTPAPTIASQPLSLRPEACRPAAGGAVHTRGLDFACDIYIWAPLAGTCGVLLLSLVITLYCGRARVKFSRSADAPAYQQGQNQLYNELNLGRREEYDVLDKRRGRDPEMGGKPRRKNPQEGLYNELQKDKMAEAYSEIGMKGERRRGKGHDGLYQGLSTATKDTYDALHMQALPPRSRGSGATNFSLLKQAGDVEENPGPGIHMATYEVLCEVARKLGTDDREVVLFLLNVFIPQPTLAQLIGALRALKEEGRLTFPLLAECLFRAGRRDLLRDLLHLDPRFLERHLAGTMSYFSPYQLTVLHVDGELCARDIRSLIFLSKDTIGSRSTPQTFLHWVYCMENLDLLGPTDVDALMSMLRSLSRVDLQRQVQTLMGLHLSGPSHSQHYRHTPLETDFYDYKDDDDKTSGSGEGRGSLLTCGDVEENPGPHMTEYKPTVRLATRDDVPRAVRTLAAAFADYPATRHTVDPDRHIERVTELQELFLTRVGLDIGKVWVADDGAAVAVWTTPESVEAGAVFAEIGPRMAELSGSRLAAQQQMEGLLAPHRPKEPAWFLATVGVSPDHQGKGLGSAVVLPGVEAAERAGVPAFLETSAPRNLPFYERLGFTVTADVEVPEGPRTWCMTRKPGA

SEQ ID NO: 2731 - protein, 945 aa, Artificial Sequence
  Synthetic Polypeptide
MALPVTALLLPLALLLHAARPYINIYNAEPANPSEKNSPTQYAYGSGEFDIQLTQSPSSLSASVGDRVTITCRASQGISSVLAWYQQKPGKAPKLLIYDASSLESGVPSRFSGSGSGTDFTLTISSLQPEDFATYYCQQFNSSITFGQGTKLEIKRTVAAGGGGSGGGGSGGGGSQVQLVQSGAEVKKPGSSVKVSCKASGGTFSDYAISWVRQAPGQGLEWMGRIIPILGVANYAQKFQGRVTITADKSTRTAYMELSSLRSEDTAVYYCARNWADAFDIWGQGTMVTVSSASTREQKLISEEDLAKPTTTPAPRPPTPAPTIASQPLSLRPEACRPAAGGAVHTRGLDFACDIYIWAPLAGTCGVLLLSLVITLYCGRARVKFSRSADAPAYQQGQNQLYNELNLGRREEYDVLDKRRGRDPEMGGKPRRKNPQEGLYNELQKDKMAEAYSEIGMKGERRRGKGHDGLYQGLSTATKDTYDALHMQALPPRSRGSGATNFSLLKQAGDVEENPGPGIHMATYEVLCEVARKLGTDDREVVLFLLNVFIPQPTLAQLIGALRALKEEGRLTFPLLAECLFRAGRRDLLRDLLHLDPRFLERHLAGTMSYFSPYQLTVLHVDGELCARDIRSLIFLSKDTIGSRSTPQTFLHWVYCMENLDLLGPTDVDALMSMLRSLSRVDLQRQVQTLMGLHLSGPSHSQHYRHTPLETDFYDYKDDDDKTSGSGEGRGSLLTCGDVEENPGPHMTEYKPTVRLATRDDVPRAVRTLAAAFADYPATRHTVDPDRHIERVTELQELFLTRVGLDIGKVWVADDGAAVAVWTTPESVEAGAVFAEIGPRMAELSGSRLAAQQQMEGLLAPHRPKEPAWFLATVGVSPDHQGKGLGSAVVLPGVEAAERAGVPAFLETSAPRNLPFYERLGFTVTADVEVPEGPRTWCMTRKPGA

SEQ ID NO: 2732 - protein, 944 aa, Artificial Sequence
  Synthetic Polypeptide
MALPVTALLLPLALLLHAARPYINIYNAEPANPSEKNSPTQYAYGSGEFDIVMTQSPSSLSASLGGKVTITCKASQDINKYIAWYQHKPGKGPRLLIHYTSTLQPGIPSRFSGSGSGRDYSFSISNLEPEDIATYYCLQYDNLLTFGAGTKLELKRGGGGSGGGGSGGGGSEVKLQQSGPELVKPGTSVKVSCKASGYSFTDYNMYWVKQSHGKSLEWIGYIDPYKGGTIYNQKFKGKATLTVDKSSSTAFMHLNSLTSEDSAVYYCAREMITAYYFDYWGQGSSVTVSSLERTREQKLISEEDLAKPTTTPAPRPPTPAPTIASQPLSLRPEACRPAAGGAVHTRGLDFACDIYIWAPLAGTCGVLLLSLVITLYCGRARVKFSRSADAPAYQQGQNQLYNELNLGRREEYDVLDKRRGRDPEMGGKPRRKNPQEGLYNELQKDKMAEAYSEIGMKGERRRGKGHDGLYQGLSTATKDTYDALHMQALPPRSRGSGATNFSLLKQAGDVEENPGPGIHMATYEVLCEVARKLGTDDREVVLFLLNVFIPQPTLAQLIGALRALKEEGRLTFPLLAECLFRAGRRDLLRDLLHLDPRFLERHLAGTMSYFSPYQLTVLHVDGELCARDIRSLIFLSKDTIGSRSTPQTFLHWVYCMENLDLLGPTDVDALMSMLRSLSRVDLQRQVQTLMGLHLSGPSHSQHYRHTPLETDFYDYKDDDDKTSGSGEGRGSLLTCGDVEENPGPHMTEYKPTVRLATRDDVPRAVRTLAAAFADYPATRHTVDPDRHIERVTELQELFLTRVGLDIGKVWVADDGAAVAVWTTPESVEAGAVFAEIGPRMAELSGSRLAAQQQMEGLLAPHRPKEPAWFLATVGVSPDHQGKGLGSAVVLPGVEAAERAGVPAFLETSAPRNLPFYERLGFTVTADVEVPEGPRTWCMTRKPGA

SEQ ID NO: 2733 - protein, 960 aa, Artificial Sequence
  Synthetic Polypeptide
MALPVTALLLPLALLLHAARPDIQMTQSPSSLSASVGDRVTINCKASQDINSYLSWFQQKPGKAPKTLIYRANRLVDGVPSRFSGSGSGQDYTLTISSLQPEDFATYYCLQYDEFPLTFGGGTKVEIKGGGGSGGGGSGGGGSQVQLVQSGAEVKKPGASVKVSCKASGYTFTNYDINWVRQAPGQGLEWIGWIYPGDGSTKYNEKFKAKATLTADTSTSTAYMELRSLRSDDTAVYYCASGYEDAMDYWGQGTTVTVSSAKPTTTPAPRPPTPAPTIASQPLSLRPEACRPAAGGAVHTRGLDFACDITREQKLISEEDLAKPTTTPAPRPPTPAPTIASQPLSLRPEACRPAAGGAVHTRGLDFACDIYIWAPLAGTCGVLLLSLVITLYCGRARVKFSRSADAPAYQQGQNQLYNELNLGRREEYDVLDKRRGRDPEMGGKPRRKNPQEGLYNELQKDKMAEAYSEIGMKGERRRGKGHDGLYQGLSTATKDTYDALHMQALPPRSRGSGATNFSLLKQAGDVEENPGPGIHMATYEVLCEVARKLGTDDREVVLFLLNVFIPQPTLAQLIGALRALKEEGRLTFPLLAECLFRAGRRDLLRDLLHLDPRFLERHLAGTMSYFSPYQLTVLHVDGELCARDIRSLIFLSKDTIGSRSTPQTFLHWVYCMENLDLLGPTDVDALMSMLRSLSRVDLQRQVQTLMGLHLSGPSHSQHYRHTPLETDFYDYKDDDDKTSGSGEGRGSLLTCGDVEENPGPHMTEYKPTVRLATRDDVPRAVRTLAAAFADYPATRHTVDPDRHIERVTELQELFLTRVGLDIGKVWVADDGAAVAVWTTPESVEAGAVFAEIGPRMAELSGSRLAAQQQMEGLLAPHRPKEPAWFLATVGVSPDHQGKGLGSAVVLPGVEAAERAGVPAFLETSAPRNLPFYERLGFTVTADVEVPEGPRTWCMTRKPGA

SEQ ID NO: 2734 - protein, 916 aa, Artificial Sequence
  Synthetic Polypeptide
MALPVTALLLPLALLLHAARPEIVLTQSPLSLPVTPGEPASISCRSSQSLLHSNGYNYLDWYLQKPGQSPQLLIYLGVNSVSGVPDRFSGSGSGTDFTLKISRVEAEDVGVYYCMQALQTPWTFGQGTKVEIKGGGGSGGGGSGGGGSQVQLVQSGAEVKKPGSSVKVSCKASGGIFSNHAISWVRQAPGQGLEWMGGIIPIFGTANYAQKFQGRVTITADESTSTAFMELSSLRSEDTAVYYCAREWADVFDIWGQGTMVTVSSTREQKLISEEDLAKPTTTPAPRPPTPAPTIASQPLSLRPEACRPAAGGAVHTRGLDFACDIYIWAPLAGTCGVLLLSLVITLYCGRARVKFSRSADAPAYQQGQNQLYNELNLGRREEYDVLDKRRGRDPEMGGKPRRKNPQEGLYNELQKDKMAEAYSEIGMKGERRRGKGHDGLYQGLSTATKDTYDALHMQALPPRSRGSGATNFSLLKQAGDVEENPGPGIHMATYEVLCEVARKLGTDDREVVLFLLNVFIPQPTLAQLIGALRALKEEGRLTFPLLAECLFRAGRRDLLRDLLHLDPRFLERHLAGTMSYFSPYQLTVLHVDGELCARDIRSLIFLSKDTIGSRSTPQTFLHWVYCMENLDLLGPTDVDALMSMLRSLSRVDLQRQVQTLMGLHLSGPSHSQHYRHTPLETDFYDYKDDDDKTSGSGEGRGSLLTCGDVEENPGPHMTEYKPTVRLATRDDVPRAVRTLAAAFADYPATRHTVDPDRHIERVTELQELFLTRVGLDIGKVWVADDGAAVAVWTTPESVEAGAVFAEIGPRMAELSGSRLAAQQQMEGLLAPHRPKEPAWFLATVGVSPDHQGKGLGSAVVLPGVEAAERAGVPAFLETSAPRNLPFYERLGFTVTADVEVPEGPRTWCMTRKPGA

SEQ ID NO: 2735 - protein, 915 aa, Artificial Sequence
  Synthetic Polypeptide
MALPVTALLLPLALLLHAARPDIQMTQSPASLTVSLGQRATISCRASESVDSYGNSYLHWYQQKPGQPPQLLIYLASNLESGVPARFSGSGSRTDFTLTIDPVEADDAATYYCQQNNEDPWTFGGGTKVEIKGGGGSGGGGSGGGGSEVQLQQSGAELVKPGASVKMSCKAFGYTFTTFPIEWMKQSHGKSLEWIGNFHPYNDQTKYNEEFKGRAKLTIDRSSSTVYLELGRLTSDDSAVYYCARGYYYAFDFWGQGTTLTVSSTREQKLISEEDLAKPTTTPAPRPPTPAPTIASQPLSLRPEACRPAAGGAVHTRGLDFACDIYIWAPLAGTCGVLLLSLVITLYCGRARVKFSRSADAPAYQQGQNQLYNELNLGRREEYDVLDKRRGRDPEMGGKPRRKNPQEGLYNELQKDKMAEAYSEIGMKGERRRGKGHDGLYQGLSTATKDTYDALHMQALPPRSRGSGATNFSLLKQAGDVEENPGPGIHMATYEVLCEVARKLGTDDREVVLFLLNVFIPQPTLAQLIGALRALKEEGRLTFPLLAECLFRAGRRDLLRDLLHLDPRFLERHLAGTMSYFSPYQLTVLHVDGELCARDIRSLIFLSKDTIGSRSTPQTFLHWVYCMENLDLLGPTDVDALMSMLRSLSRVDLQRQVQTLMGLHLSGPSHSQHYRHTPLETDFYDYKDDDDKTSGSGEGRGSLLTCGDVEENPGPHMTEYKPTVRLATRDDVPRAVRTLAAAFADYPATRHTVDPDRHIERVTELQELFLTRVGLDIGKVWVADDGAAVAVWTTPESVEAGAVFAEIGPRMAELSGSRLAAQQQMEGLLAPHRPKEPAWFLATVGVSPDHQGKGLGSAVVLPGVEAAERAGVPAFLETSAPRNLPFYERLGFTVTADVEVPEGPRTWCMTRKPGA

SEQ ID NO: 2736 - protein, 912 aa, Artificial Sequence
  Synthetic Polypeptide
MALPVTALLLPLALLLHAARPDIQMTQSPSSLSASVGDRVTITCRASQGIRNDLGWYQQKPGKAPKRLIYAASSLQSGVPSRFSGSGSGTEFTLTISSLQPEDFATYYCLQHNSYPWTFGQGTKLEIKGGGGSGGGGSGGGGSEVQLVESGGALIQPGGSLRLSCVASGFTISGNYMSWVRQAPGKGLEWVSLIYSGDSTYYADSVKGRFTISRDISKNTVYLQMNSLRVEDTAVYYCVRDGYYVSDMVVWGKGTTVTVSSTREQKLISEEDLAKPTTTPAPRPPTPAPTIASQPLSLRPEACRPAAGGAVHTRGLDFACDIYIWAPLAGTCGVLLLSLVITLYCGRARVKFSRSADAPAYQQGQNQLYNELNLGRREEYDVLDKRRGRDPEMGGKPRRKNPQEGLYNELQKDKMAEAYSEIGMKGERRRGKGHDGLYQGLSTATKDTYDALHMQALPPRSRGSGATNFSLLKQAGDVEENPGPGIHMATYEVLCEVARKLGTDDREVVLFLLNVFIPQPTLAQLIGALRALKEEGRLTFPLLAECLFRAGRRDLLRDLLHLDPRFLERHLAGTMSYFSPYQLTVLHVDGELCARDIRSLIFLSKDTIGSRSTPQTFLHWVYCMENLDLLGPTDVDALMSMLRSLSRVDLQRQVQTLMGLHLSGPSHSQHYRHTPLETDFYDYKDDDDKTSGSGEGRGSLLTCGDVEENPGPHMTEYKPTVRLATRDDVPRAVRTLAAAFADYPATRHTVDPDRHIERVTELQELFLTRVGLDIGKVWVADDGAAVAVWTTPESVEAGAVFAEIGPRMAELSGSRLAAQQQMEGLLAPHRPKEPAWFLATVGVSPDHQGKGLGSAVVLPGVEAAERAGVPAFLETSAPRNLPFYERLGFTVTADVEVPEGPRTWCMTRKPGA

SEQ ID NO: 2737 - protein, 922 aa, Artificial Sequence
  Synthetic Polypeptide
MALPVTALLLPLALLLHAARPDVLLTQSPLSLPVTLGQPASISCRSSQTIVHSNGNTYLEWFQQRPGQSPRLLIYQVSNRFSGVPDRFSGSGSGTDFTLKISRVEAEDVGVYYCFQGSHVPRTFGGGTKVEIKRGGGGSGGGGSGGGGSQIQLVQSGSELKKPGASVKVSCKASGYTFTNYGMNWVRQAPGQGLKWMGWINTNTGEPKYAEEFKGRFALSLDTSVSTAYLQINSLKAEDTAVYFCARGYGNYARGAWLAYWGQGTLVTVSSTREQKLISEEDLAKPTTTPAPRPPTPAPTIASQPLSLRPEACRPAAGGAVHTRGLDFACDIYIWAPLAGTCGVLLLSLVITLYCGRARVKFSRSADAPAYQQGQNQLYNELNLGRREEYDVLDKRRGRDPEMGGKPRRKNPQEGLYNELQKDKMAEAYSEIGMKGERRRGKGHDGLYQGLSTATKDTYDALHMQALPPRSRGSGATNFSLLKQAGDVEENPGPGIHMATYEVLCEVARKLGTDDREVVLFLLNVFIPQPTLAQLIGALRALKEEGRLTFPLLAECLFRAGRRDLLRDLLHLDPRFLERHLAGTMSYFSPYQLTVLHVDGELCARDIRSLIFLSKDTIGSRSTPQTFLHWVYCMENLDLLGPTDVDALMSMLRSLSRVDLQRQVQTLMGLHLSGPSHSQHYRHTPLETDFYDYKDDDDKTSGSGEGRGSLLTCGDVEENPGPHMTEYKPTVRLATRDDVPRAVRTLAAAFADYPATRHTVDPDRHIERVTELQELFLTRVGLDIGKVWVADDGAAVAVWTTPESVEAGAVFAEIGPRMAELSGSRLAAQQQMEGLLAPHRPKEPAWFLATVGVSPDHQGKGLGSAVVLPGVEAAERAGVPAFLETSAPRNLPFYERLGFTVTADVEVPEGPRTWCMTRKPGA

SEQ ID NO: 2738 - protein, 909 aa, Artificial Sequence
  Synthetic Polypeptide
MALPVTALLLPLALLLHAARPDEIVLTQSPATLSLSPGERATLSCSASSSINYIYWLQQKPGQAPRILIYLTSNLASGVPARFSGSGSGTDFTLTISSLEPEDFAVYYCLQWSSNPLTFGGGTKVEIKGGGGSGGGGSGGGGSFEVQLVESGGGLVKPGGSLRLSCAASGFTFSSYDMSWVRQAPGKGLEWVSTISSGGSYTYYLDSIKGRFTISRDNAKNSLYLQMNSLRAEDTAVYYCARQGLDYWGRGTLVTVSSTREQKLISEEDLAKPTTTPAPRPPTPAPTIASQPLSLRPEACRPAAGGAVHTRGLDFACDIYIWAPLAGTCGVLLLSLVITLYCGRARVKFSRSADAPAYQQGQNQLYNELNLGRREEYDVLDKRRGRDPEMGGKPRRKNPQEGLYNELQKDKMAEAYSEIGMKGERRRGKGHDGLYQGLSTATKDTYDALHMQALPPRSRGSGATNFSLLKQAGDVEENPGPGIHMATYEVLCEVARKLGTDDREVVLFLLNVFIPQPTLAQLIGALRALKEEGRLTFPLLAECLFRAGRRDLLRDLLHLDPRFLERHLAGTMSYFSPYQLTVLHVDGELCARDIRSLIFLSKDTIGSRSTPQTFLHWVYCMENLDLLGPTDVDALMSMLRSLSRVDLQRQVQTLMGLHLSGPSHSQHYRHTPLETDFYDYKDDDDKTSGSGEGRGSLLTCGDVEENPGPHMTEYKPTVRLATRDDVPRAVRTLAAAFADYPATRHTVDPDRHIERVTELQELFLTRVGLDIGKVWVADDGAAVAVWTTPESVEAGAVFAEIGPRMAELSGSRLAAQQQMEGLLAPHRPKEPAWFLATVGVSPDHQGKGLGSAVVLPGVEAAERAGVPAFLETSAPRNLPFYERLGFTVTADVEVPEGPRTWCMTRKPGA

SEQ ID NO: 2739 - protein, 917 aa, Artificial Sequence
  Synthetic Polypeptide
MALPVTALLLPLALLLHAARPDIVMTQSPDSLAVSLGERATINCRASKSVSTSGYSFMHWYQQKPGQPPKLLIYLASNLESGVPDRFSGSGSGTDFTLTISSLQAEDVAVYYCQHSREVPWTFGQGTKVEIKRGGGGSGGGGSGGGGSQVQLVQSGAEVKKPGASVKVSCKASGYTFTNYGMNWVRQAPGQGLEWMGWINTYTGEPTYADAFKGRFAFSLDTSTSTAYLQINSLRSDDTAVYYCARDYGDYGMDYWGQGTTVTVSSTREQKLISEEDLAKPTTTPAPRPPTPAPTIASQPLSLRPEACRPAAGGAVHTRGLDFACDIYIWAPLAGTCGVLLLSLVITLYCGRARVKFSRSADAPAYQQGQNQLYNELNLGRREEYDVLDKRRGRDPEMGGKPRRKNPQEGLYNELQKDKMAEAYSEIGMKGERRRGKGHDGLYQGLSTATKDTYDALHMQALPPRSRGSGATNFSLLKQAGDVEENPGPGIHMATYEVLCEVARKLGTDDREVVLFLLNVFIPQPTLAQLIGALRALKEEGRLTFPLLAECLFRAGRRDLLRDLLHLDPRFLERHLAGTMSYFSPYQLTVLHVDGELCARDIRSLIFLSKDTIGSRSTPQTFLHWVYCMENLDLLGPTDVDALMSMLRSLSRVDLQRQVQTLMGLHLSGPSHSQHYRHTPLETDFYDYKDDDDKTSGSGEGRGSLLTCGDVEENPGPHMTEYKPTVRLATRDDVPRAVRTLAAAFADYPATRHTVDPDRHIERVTELQELFLTRVGLDIGKVWVADDGAAVAVWTTPESVEAGAVFAEIGPRMAELSGSRLAAQQQMEGLLAPHRPKEPAWFLATVGVSPDHQGKGLGSAVVLPGVEAAERAGVPAFLETSAPRNLPFYERLGFTVTADVEVPEGPRTWCMTRKPGA

SEQ ID NO: 2740 - protein, 913 aa, Artificial Sequence
  Synthetic Polypeptide
MALPVTALLLPLALLLHAARPDIVMTQTPLTLSVTIGQPASISCKSSQSLLDSDGKTYLNWLLQRPGQSPERLIYLVSKLDSGVPDRFTGSGSGTDFTLKISRVEAEDLGVYCCWQGTHFPYTFGGGTKVEIKGGGGGSGGGGSGGGGSQVQLQQPGAELVRPGASVKLSCKASGYTFTSYWMNWVKQRPGQGLEWIGMIDPSDSETHYNHIFKDKATLTVDKSSSTAYLQLSSLTSEDSAVYYCARNLYLWGQGTSVTVSSTREQKLISEEDLAKPTTTPAPRPPTPAPTIASQPLSLRPEACRPAAGGAVHTRGLDFACDIYIWAPLAGTCGVLLLSLVITLYCGRARVKFSRSADAPAYQQGQNQLYNELNLGRREEYDVLDKRRGRDPEMGGKPRRKNPQEGLYNELQKDKMAEAYSEIGMKGERRRGKGHDGLYQGLSTATKDTYDALHMQALPPRSRGSGATNFSLLKQAGDVEENPGPGIHMATYEVLCEVARKLGTDDREVVLFLLNVFIPQPTLAQLIGALRALKEEGRLTFPLLAECLFRAGRRDLLRDLLHLDPRFLERHLAGTMSYFSPYQLTVLHVDGELCARDIRSLIFLSKDTIGSRSTPQTFLHWVYCMENLDLLGPTDVDALMSMLRSLSRVDLQRQVQTLMGLHLSGPSHSQHYRHTPLETDFYDYKDDDDKTSGSGEGRGSLLTCGDVEENPGPHMTEYKPTVRLATRDDVPRAVRTLAAAFADYPATRHTVDPDRHIERVTELQELFLTRVGLDIGKVWVADDGAAVAVWTTPESVEAGAVFAEIGPRMAELSGSRLAAQQQMEGLLAPHRPKEPAWFLATVGVSPDHQGKGLGSAVVLPGVEAAERAGVPAFLETSAPRNLPFYERLGFTVTADVEVPEGPRTWCMTRKPGA

SEQ ID NO: 2741 - protein, 917 aa, Artificial Sequence
  Synthetic Polypeptide
MALPVTALLLPLALLLHAARPDDIQLTQSPSSLSASVGDRVTITCKASQSVDYEGDSFLNWYQQKPGKAPKLLIYAASNLESGVPSRFSGSGSGTDFTLTISSLQPEDFATYYCQQSNEDPLTFGQGTKVEIKRGGGGSGGGGSGGGGSEVQLVESGGGLVQPGGSLRLSCAASGYTFSSYWIEWVRQAPGKGLEWIGEILPGGGDTNYNEIFKGRATFSADTSKNTAYLQMNSLRAEDTAVYYCTRRVPIRLDYWGQGTLVTVSSTREQKLISEEDLAKPTTTPAPRPPTPAPTIASQPLSLRPEACRPAAGGAVHTRGLDFACDIYIWAPLAGTCGVLLLSLVITLYCGRARVKFSRSADAPAYQQGQNQLYNELNLGRREEYDVLDKRRGRDPEMGGKPRRKNPQEGLYNELQKDKMAEAYSEIGMKGERRRGKGHDGLYQGLSTATKDTYDALHMQALPPRSRGSGATNFSLLKQAGDVEENPGPGIHMATYEVLCEVARKLGTDDREVVLFLLNVFIPQPTLAQLIGALRALKEEGRLTFPLLAECLFRAGRRDLLRDLLHLDPRFLERHLAGTMSYFSPYQLTVLHVDGELCARDIRSLIFLSKDTIGSRSTPQTFLHWVYCMENLDLLGPTDVDALMSMLRSLSRVDLQRQVQTLMGLHLSGPSHSQHYRHTPLETDFYDYKDDDDKTSGSGEGRGSLLTCGDVEENPGPHMTEYKPTVRLATRDDVPRAVRTLAAAFADYPATRHTVDPDRHIERVTELQELFLTRVGLDIGKVWVADDGAAVAVWTTPESVEAGAVFAEIGPRMAELSGSRLAAQQQMEGLLAPHRPKEPAWFLATVGVSPDHQGKGLGSAVVLPGVEAAERAGVPAFLETSAPRNLPFYERLGFTVTADVEVPEGPRTWCMTRKPGA

SEQ ID NO: 2742 - protein, 913 aa, Artificial Sequence
  Synthetic Polypeptide
MALPVTALLLPLALLLHAARPDIVMTQTPLSLSVTPGQPASISCKSSQSLLDGDGKTYLNWLLQKPGQSPQRLIYLVSKLDSGVPDRFSGSGSGTDFTLKISRVEAEDVGVYYCWQGTHFPRTFGQGTKLEIKGGGGSGGGGSGGGGSQVQLVQSGAEVKKPGASVKVSCKASGYTFKDTYIHWVRQAPGQGLEWMGRIDPANGNTKYDPKFQGRVTMTRDTSISTAYMELSRLRSDDTAVYYCARRGGVDWGQGTLVTVSSTREQKLISEEDLAKPTTTPAPRPPTPAPTIASQPLSLRPEACRPAAGGAVHTRGLDFACDIYIWAPLAGTCGVLLLSLVITLYCGRARVKFSRSADAPAYQQGQNQLYNELNLGRREEYDVLDKRRGRDPEMGGKPRRKNPQEGLYNELQKDKMAEAYSEIGMKGERRRGKGHDGLYQGLSTATKDTYDALHMQALPPRSRGSGATNFSLLKQAGDVEENPGPGIHMATYEVLCEVARKLGTDDREVVLFLLNVFIPQPTLAQLIGALRALKEEGRLTFPLLAECLFRAGRRDLLRDLLHLDPRFLERHLAGTMSYFSPYQLTVLHVDGELCARDIRSLIFLSKDTIGSRSTPQTFLHWVYCMENLDLLGPTDVDALMSMLRSLSRVDLQRQVQTLMGLHLSGPSHSQHYRHTPLETDFYDYKDDDDKTSGSGEGRGSLLTCGDVEENPGPHMTEYKPTVRLATRDDVPRAVRTLAAAFADYPATRHTVDPDRHIERVTELQELFLTRVGLDIGKVWVADDGAAVAVWTTPESVEAGAVFAEIGPRMAELSGSRLAAQQQMEGLLAPHRPKEPAWFLATVGVSPDHQGKGLGSAVVLPGVEAAERAGVPAFLETSAPRNLPFYERLGFTVTADVEVPEGPRTWCMTRKPGA

SEQ ID NO: 2743 - protein, 921 aa, Artificial Sequence
  Synthetic Polypeptide
MALPVTALLLPLALLLHAARPDIVMTQSPDSLAVSLGERATINCESSQSLLNSGNQKNYLTWYQQKPGQPPKPLIYWASTRESGVPDRFSGSGSGTDFTLTISSLQAEDVAVYYCQNDYSYPYTFGQGTKLEIKRGGGGSGGGGSGGGGSEVQLVQSGAEVKKPGESLKISCKGSGYSFTDYYMKWARQMPGKGLEWMGDIIPSNGATFYNQKFKGQVTISADKSISTTYLQWSSLKASDTAMYYCARSHLLRASWFAYWGQGTMVTVSSTREQKLISEEDLAKPTTTPAPRPPTPAPTIASQPLSLRPEACRPAAGGAVHTRGLDFACDIYIWAPLAGTCGVLLLSLVITLYCGRARVKFSRSADAPAYQQGQNQLYNELNLGRREEYDVLDKRRGRDPEMGGKPRRKNPQEGLYNELQKDKMAEAYSEIGMKGERRRGKGHDGLYQGLSTATKDTYDALHMQALPPRSRGSGATNFSLLKQAGDVEENPGPGIHMATYEVLCEVARKLGTDDREVVLFLLNVFIPQPTLAQLIGALRALKEEGRLTFPLLAECLFRAGRRDLLRDLLHLDPRFLERHLAGTMSYFSPYQLTVLHVDGELCARDIRSLIFLSKDTIGSRSTPQTFLHWVYCMENLDLLGPTDVDALMSMLRSLSRVDLQRQVQTLMGLHLSGPSHSQHYRHTPLETDFYDYKDDDDKTSGSGEGRGSLLTCGDVEENPGPHMTEYKPTVRLATRDDVPRAVRTLAAAFADYPATRHTVDPDRHIERVTELQELFLTRVGLDIGKVWVADDGAAVAVWTTPESVEAGAVFAEIGPRMAELSGSRLAAQQQMEGLLAPHRPKEPAWFLATVGVSPDHQGKGLGSAVVLPGVEAAERAGVPAFLETSAPRNLPFYERLGFTVTADVEVPEGPRTWCMTRKPGA

SEQ ID NO: 2744 - protein, 916 aa, Artificial Sequence
  Synthetic Polypeptide
MALPVTALLLPLALLLHAARPDIVLTQSPASLAVSLGQRATISCRASESVDNYGNTFMHWYQQKPGQPPKLLIYRASNLESGIPARFSGSGSRTDFTLTINPVEADDVATYYCQQSNEDPPTFGAGTKLELKGGGGSGGGGSGGGGSQIQLVQSGPELKKPGETVKISCKASGYIFTNYGMNWVKQAPGKSFKWMGWINTYTGESTYSADFKGRFAFSLETSASTAYLHINDLKNEDTATYFCARSGGYDPMDYWGQGTSVTVSSTREQKLISEEDLAKPTTTPAPRPPTPAPTIASQPLSLRPEACRPAAGGAVHTRGLDFACDIYIWAPLAGTCGVLLLSLVITLYCGRARVKFSRSADAPAYQQGQNQLYNELNLGRREEYDVLDKRRGRDPEMGGKPRRKNPQEGLYNELQKDKMAEAYSEIGMKGERRRGKGHDGLYQGLSTATKDTYDALHMQALPPRSRGSGATNFSLLKQAGDVEENPGPGIHMATYEVLCEVARKLGTDDREVVLFLLNVFIPQPTLAQLIGALRALKEEGRLTFPLLAECLFRAGRRDLLRDLLHLDPRFLERHLAGTMSYFSPYQLTVLHVDGELCARDIRSLIFLSKDTIGSRSTPQTFLHWVYCMENLDLLGPTDVDALMSMLRSLSRVDLQRQVQTLMGLHLSGPSHSQHYRHTPLETDFYDYKDDDDKTSGSGEGRGSLLTCGDVEENPGPHMTEYKPTVRLATRDDVPRAVRTLAAAFADYPATRHTVDPDRHIERVTELQELFLTRVGLDIGKVWVADDGAAVAVWTTPESVEAGAVFAEIGPRMAELSGSRLAAQQQMEGLLAPHRPKEPAWFLATVGVSPDHQGKGLGSAVVLPGVEAAERAGVPAFLETSAPRNLPFYERLGFTVTADVEVPEGPRTWCMTRKPGA

SEQ ID NO: 2745 - protein, 920 aa, Artificial Sequence
  Synthetic Polypeptide
MALPVTALLLPLALLLHAARPDFVMTQSPDSLAVSLGERVTMSCKSSQSLLNSGNQKNYLTWYQQKPGQPPKLLIYWASTRESGVPDRFSGSGSGTDFTLTISSLQAEDVAVYYCQNDYSYPYTFGQGTKLEIKGGGGSGGGGSGGGGSEVQLVQSGAELKKPGASVKVSCKASGYTFTDYYMKWVRQAPGQGLEWIGDIIPSNGATFYNQKFKGRVTITVDKSTSTAYMELSSLRSEDTAVYYCARSHLLRASWFAYWGQGTLVTVSSTREQKLISEEDLAKPTTTPAPRPPTPAPTIASQPLSLRPEACRPAAGGAVHTRGLDFACDIYIWAPLAGTCGVLLLSLVITLYCGRARVKFSRSADAPAYQQGQNQLYNELNLGRREEYDVLDKRRGRDPEMGGKPRRKNPQEGLYNELQKDKMAEAYSEIGMKGERRRGKGHDGLYQGLSTATKDTYDALHMQALPPRSRGSGATNFSLLKQAGDVEENPGPGIHMATYEVLCEVARKLGTDDREVVLFLLNVFIPQPTLAQLIGALRALKEEGRLTFPLLAECLFRAGRRDLLRDLLHLDPRFLERHLAGTMSYFSPYQLTVLHVDGELCARDIRSLIFLSKDTIGSRSTPQTFLHWVYCMENLDLLGPTDVDALMSMLRSLSRVDLQRQVQTLMGLHLSGPSHSQHYRHTPLETDFYDYKDDDDKTSGSGEGRGSLLTCGDVEENPGPHMTEYKPTVRLATRDDVPRAVRTLAAAFADYPATRHTVDPDRHIERVTELQELFLTRVGLDIGKVWVADDGAAVAVWTTPESVEAGAVFAEIGPRMAELSGSRLAAQQQMEGLLAPHRPKEPAWFLATVGVSPDHQGKGLGSAVVLPGVEAAERAGVPAFLETSAPRNLPFYERLGFTVTADVEVPEGPRTWCMTRKPGA

SEQ ID NO: 2746 - protein, 920 aa, Artificial Sequence
  Synthetic Polypeptide
MALPVTALLLPLALLLHAARPDFVMTQSPDSLAVSLGERVTMSCKSSQSLLNSGNQKNYLTWYQQKPGQPPKLLIYWASTRESGVPDRFSGSGSGTDFTLTISSLQAEDVAVYYCQNDYSYPYTFGQGTKLEIKGGGGSGGGGSGGGGSQVQLVQSGAELKKPGASVKVSCKASGYTFTDYYMKWVRQAPGQGLEWIGDIIPSNGATFYNQKFKGRVTITVDKSTSTAYMELSSLRSEDTAVYYCARSHLLRASWFAYWGQGTLVTVSSTREQKLISEEDLAKPTTTPAPRPPTPAPTIASQPLSLRPEACRPAAGGAVHTRGLDFACDIYIWAPLAGTCGVLLLSLVITLYCGRARVKFSRSADAPAYQQGQNQLYNELNLGRREEYDVLDKRRGRDPEMGGKPRRKNPQEGLYNELQKDKMAEAYSEIGMKGERRRGKGHDGLYQGLSTATKDTYDALHMQALPPRSRGSGATNFSLLKQAGDVEENPGPGIHMATYEVLCEVARKLGTDDREVVLFLLNVFIPQPTLAQLIGALRALKEEGRLTFPLLAECLFRAGRRDLLRDLLHLDPRFLERHLAGTMSYFSPYQLTVLHVDGELCARDIRSLIFLSKDTIGSRSTPQTFLHWVYCMENLDLLGPTDVDALMSMLRSLSRVDLQRQVQTLMGLHLSGPSHSQHYRHTPLETDFYDYKDDDDKTSGSGEGRGSLLTCGDVEENPGPHMTEYKPTVRLATRDDVPRAVRTLAAAFADYPATRHTVDPDRHIERVTELQELFLTRVGLDIGKVWVADDGAAVAVWTTPESVEAGAVFAEIGPRMAELSGSRLAAQQQMEGLLAPHRPKEPAWFLATVGVSPDHQGKGLGSAVVLPGVEAAERAGVPAFLETSAPRNLPFYERLGFTVTADVEVPEGPRTWCMTRKPGA

SEQ ID NO: 2747 - protein, 914 aa, Artificial Sequence
  Synthetic Polypeptide
MALPVTALLLPLALLLHAARPEIVLTQSPGTLSLSPGERATLSCRASQSVSSSYLAWYQQKPGQAPRLLIYGASSRATGIPDRFSGSGSGTDFTLTISRLEPEDFAVYYCQQDYGFPWTFGQGTKVEIKRGGGGSGGGGSGGGGSEVQLVQSGAEVKKPGESLKISCKGSGYSFTSYWISWVRQMPGKGLEWMGIIDPSDSDTRYSPSFQGQVTISADKSISTAYLQWSSLKASDTAMYYCARGDGSTDLDYWGQGTLVTVSSTREQKLISEEDLAKPTTTPAPRPPTPAPTIASQPLSLRPEACRPAAGGAVHTRGLDFACDIYIWAPLAGTCGVLLLSLVITLYCGRARVKFSRSADAPAYQQGQNQLYNELNLGRREEYDVLDKRRGRDPEMGGKPRRKNPQEGLYNELQKDKMAEAYSEIGMKGERRRGKGHDGLYQGLSTATKDTYDALHMQALPPRSRGSGATNFSLLKQAGDVEENPGPGIHMATYEVLCEVARKLGTDDREVVLFLLNVFIPQPTLAQLIGALRALKEEGRLTFPLLAECLFRAGRRDLLRDLLHLDPRFLERHLAGTMSYFSPYQLTVLHVDGELCARDIRSLIFLSKDTIGSRSTPQTFLHWVYCMENLDLLGPTDVDALMSMLRSLSRVDLQRQVQTLMGLHLSGPSHSQHYRHTPLETDFYDYKDDDDKTSGSGEGRGSLLTCGDVEENPGPHMTEYKPTVRLATRDDVPRAVRTLAAAFADYPATRHTVDPDRHIERVTELQELFLTRVGLDIGKVWVADDGAAVAVWTTPESVEAGAVFAEIGPRMAELSGSRLAAQQQMEGLLAPHRPKEPAWFLATVGVSPDHQGKGLGSAVVLPGVEAAERAGVPAFLETSAPRNLPFYERLGFTVTADVEVPEGPRTWCMTRKPGA

SEQ ID NO: 2748 - protein, 916 aa, Artificial Sequence
  Synthetic Polypeptide
MALPVTALLLPLALLLHAARPQFVLTQPPSVSTNPGSTVKLSCKRNTGNIGSNYVNWYQQKPGQSPTTMIYRDDKRPDGVPDRFSGSIDRSSNSALLTINNVQTEDEADYFCQSYSSGINIIFGGGTKLTVLGGGGSGGGGSGGGGSQVQLQESGPGLVKPSETLSLTCTVSGFSLTTYDVHWVRQPPGKGLEWMGRIQNAGITDYNSALKSRLIISRDTSKSQVFLKMNSVTTADTAMYFCAKTGSYFYAFDHWGQGTLVTVSSTREQKLISEEDLAKPTTTPAPRPPTPAPTIASQPLSLRPEACRPAAGGAVHTRGLDFACDIYIWAPLAGTCGVLLLSLVITLYCGRARVKFSRSADAPAYQQGQNQLYNELNLGRREEYDVLDKRRGRDPEMGGKPRRKNPQEGLYNELQKDKMAEAYSEIGMKGERRRGKGHDGLYQGLSTATKDTYDALHMQALPPRSRGSGATNFSLLKQAGDVEENPGPGIHMATYEVLCEVARKLGTDDREVVLFLLNVFIPQPTLAQLIGALRALKEEGRLTFPLLAECLFRAGRRDLLRDLLHLDPRFLERHLAGTMSYFSPYQLTVLHVDGELCARDIRSLIFLSKDTIGSRSTPQTFLHWVYCMENLDLLGPTDVDALMSMLRSLSRVDLQRQVQTLMGLHLSGPSHSQHYRHTPLETDFYDYKDDDDKTSGSGEGRGSLLTCGDVEENPGPHMTEYKPTVRLATRDDVPRAVRTLAAAFADYPATRHTVDPDRHIERVTELQELFLTRVGLDIGKVWVADDGAAVAVWTTPESVEAGAVFAEIGPRMAELSGSRLAAQQQMEGLLAPHRPKEPAWFLATVGVSPDHQGKGLGSAVVLPGVEAAERAGVPAFLETSAPRNLPFYERLGFTVTADVEVPEGPRTWCMTRKPGA

SEQ ID NO: 2749 - protein, 913 aa, Artificial Sequence
  Synthetic Polypeptide
MALPVTALLLPLALLLHAARPDIQMTQSPASLSASLGETVTIECRPSEDIHSNVAWYQQKPGNSPQLLIYDASNLADGVPSRFSGSGSGTQYSLKINSLQSEDVASYFCHQYNIYPYTFGSGTKLELKGGGGSGGGGSGGGGSQVQLQESGPTLVKPGDSVKMSCKASGYTFTDYIIHWVKQSHGKSLEWIGYINPYSDGTNYNEKFKSKATLTVDKSTSTAYMEFSRLTSEDSAIYFCALNYGSYYAMDAWGQGTSVTVSSTREQKLISEEDLAKPTTTPAPRPPTPAPTIASQPLSLRPEACRPAAGGAVHTRGLDFACDIYIWAPLAGTCGVLLLSLVITLYCGRARVKFSRSADAPAYQQGQNQLYNELNLGRREEYDVLDKRRGRDPEMGGKPRRKNPQEGLYNELQKDKMAEAYSEIGMKGERRRGKGHDGLYQGLSTATKDTYDALHMQALPPRSRGSGATNFSLLKQAGDVEENPGPGIHMATYEVLCEVARKLGTDDREVVLFLLNVFIPQPTLAQLIGALRALKEEGRLTFPLLAECLFRAGRRDLLRDLLHLDPRFLERHLAGTMSYFSPYQLTVLHVDGELCARDIRSLIFLSKDTIGSRSTPQTFLHWVYCMENLDLLGPTDVDALMSMLRSLSRVDLQRQVQTLMGLHLSGPSHSQHYRHTPLETDFYDYKDDDDKTSGSGEGRGSLLTCGDVEENPGPHMTEYKPTVRLATRDDVPRAVRTLAAAFADYPATRHTVDPDRHIERVTELQELFLTRVGLDIGKVWVADDGAAVAVWTTPESVEAGAVFAEIGPRMAELSGSRLAAQQQMEGLLAPHRPKEPAWFLATVGVSPDHQGKGLGSAVVLPGVEAAERAGVPAFLETSAPRNLPFYERLGFTVTADVEVPEGPRTWCMTRKPGA

SEQ ID NO: 2750 - protein, 914 aa, Artificial Sequence
  Synthetic Polypeptide
MALPVTALLLPLALLLHAARPEIVLTQSPATLSLSPGERATLSCRASQSVSSYLAWYQQKPGQAPRLLIYDASNRATGIPARFSGSGSGTDFTLTISSLEPEDFAVYYCQQRSNWPLTFGQGTKVEIKRGGGGSGGGGSGGGGSEVQLLESGGGLVQPGGSLRLSCAASGFTFSGYWMHWVRQAPGKGLEWVSAIRSDGSSKYYADSVKGRFTISRDNSKNTLYLQMNSLRAEDTAVYYCAKDGVIEDTFDYWGQGTLVTVSSTREQKLISEEDLAKPTTTPAPRPPTPAPTIASQPLSLRPEACRPAAGGAVHTRGLDFACDIYIWAPLAGTCGVLLLSLVITLYCGRARVKFSRSADAPAYQQGQNQLYNELNLGRREEYDVLDKRRGRDPEMGGKPRRKNPQEGLYNELQKDKMAEAYSEIGMKGERRRGKGHDGLYQGLSTATKDTYDALHMQALPPRSRGSGATNFSLLKQAGDVEENPGPGIHMATYEVLCEVARKLGTDDREVVLFLLNVFIPQPTLAQLIGALRALKEEGRLTFPLLAECLFRAGRRDLLRDLLHLDPRFLERHLAGTMSYFSPYQLTVLHVDGELCARDIRSLIFLSKDTIGSRSTPQTFLHWVYCMENLDLLGPTDVDALMSMLRSLSRVDLQRQVQTLMGLHLSGPSHSQHYRHTPLETDFYDYKDDDDKTSGSGEGRGSLLTCGDVEENPGPHMTEYKPTVRLATRDDVPRAVRTLAAAFADYPATRHTVDPDRHIERVTELQELFLTRVGLDIGKVWVADDGAAVAVWTTPESVEAGAVFAEIGPRMAELSGSRLAAQQQMEGLLAPHRPKEPAWFLATVGVSPDHQGKGLGSAVVLPGVEAAERAGVPAFLETSAPRNLPFYERLGFTVTADVEVPEGPRTWCMTRKPGA

SEQ ID NO: 2751 - protein, 910 aa, Artificial Sequence
  Synthetic Polypeptide
MALPVTALLLPLALLLHAARPDVQITQSPSYLAASPGETITINCRASKSISKDLAWYQEKPGKTNKLLIYSGSTLQSGIPSRFSGSGSGTDFTLTISSLEPEDFAMYYCQQHNKYPYTFGGGTKLEIKRGGGGSGGGGSGGGGSQVQLQQPGAELVRPGASVKLSCKASGYTFTSYWMNWVKQRPDQGLEWIGRIDPYDSETHYNQKFKDKAILTVDKSSSTAYMQLSSLTSEDSAVYYCARGNWDDYWGQGTTLTVSSTREQKLISEEDLAKPTTTPAPRPPTPAPTIASQPLSLRPEACRPAAGGAVHTRGLDFACDIYIWAPLAGTCGVLLLSLVITLYCGRARVKFSRSADAPAYQQGQNQLYNELNLGRREEYDVLDKRRGRDPEMGGKPRRKNPQEGLYNELQKDKMAEAYSEIGMKGERRRGKGHDGLYQGLSTATKDTYDALHMQALPPRSRGSGATNFSLLKQAGDVEENPGPGIHMATYEVLCEVARKLGTDDREVVLFLLNVFIPQPTLAQLIGALRALKEEGRLTFPLLAECLFRAGRRDLLRDLLHLDPRFLERHLAGTMSYFSPYQLTVLHVDGELCARDIRSLIFLSKDTIGSRSTPQTFLHWVYCMENLDLLGPTDVDALMSMLRSLSRVDLQRQVQTLMGLHLSGPSHSQHYRHTPLETDFYDYKDDDDKTSGSGEGRGSLLTCGDVEENPGPHMTEYKPTVRLATRDDVPRAVRTLAAAFADYPATRHTVDPDRHIERVTELQELFLTRVGLDIGKVWVADDGAAVAVWTTPESVEAGAVFAEIGPRMAELSGSRLAAQQQMEGLLAPHRPKEPAWFLATVGVSPDHQGKGLGSAVVLPGVEAAERAGVPAFLETSAPRNLPFYERLGFTVTADVEVPEGPRTWCMTRKPGA

SEQ ID NO: 2752 - protein, 941 aa, Artificial Sequence
  Synthetic Polypeptide
MALPVTALLLPLALLLHAARPYINIYNAEPANPSEKNSPTQYAYGSGEFDIQMTQSPASLSASLGETVTIECRTSKDIYSNLAWFQQEPGNSPQLLIYDASNLADGVPSRFSGSGSGTQYSLQINNLQSEDVASYFCHQYNNYPYTFGTGTKLELKGGGGSGGGGSGGGGSQVQLQESGPTLVNPGDSVKMSCKASGYTFTDHIIHWVKQSHGKSLEWIGYINPYSGGANYNGKFKSKATLTIDKSSSTAYMEFSRLTSGDSAIYYCALNYGSYYAMDAWGQGTSVTVSSTREQKLISEEDLAKPTTTPAPRPPTPAPTIASQPLSLRPEACRPAAGGAVHTRGLDFACDIYIWAPLAGTCGVLLLSLVITLYCGRARVKFSRSADAPAYQQGQNQLYNELNLGRREEYDVLDKRRGRDPEMGGKPRRKNPQEGLYNELQKDKMAEAYSEIGMKGERRRGKGHDGLYQGLSTATKDTYDALHMQALPPRSRGSGATNFSLLKQAGDVEENPGPGIHMATYEVLCEVARKLGTDDREVVLFLLNVFIPQPTLAQLIGALRALKEEGRLTFPLLAECLFRAGRRDLLRDLLHLDPRFLERHLAGTMSYFSPYQLTVLHVDGELCARDIRSLIFLSKDTIGSRSTPQTFLHWVYCMENLDLLGPTDVDALMSMLRSLSRVDLQRQVQTLMGLHLSGPSHSQHYRHTPLETDFYDYKDDDDKTSGSGEGRGSLLTCGDVEENPGPHMTEYKPTVRLATRDDVPRAVRTLAAAFADYPATRHTVDPDRHIERVTELQELFLTRVGLDIGKVWVADDGAAVAVWTTPESVEAGAVFAEIGPRMAELSGSRLAAQQQMEGLLAPHRPKEPAWFLATVGVSPDHQGKGLGSAVVLPGVEAAERAGVPAFLETSAPRNLPFYERLGFTVTADVEVPEGPRTWCMTRKPGA

SEQ ID NO: 2753 - protein, 912 aa, Artificial Sequence
  Synthetic Polypeptide
MALPVTALLLPLALLLHAARPEIVLTQSPTSMTASPGEQVTITCRASSSINYMHWYQQKPGASPRPWIYETSKLASGVPDRFSGSASGTSYSLTINNMEAEDAATYYCQQWNYPSWTFGGGTKLELKGGGGSGGGGSGGGGSEVQLVESGGGLVQPGRSLKLSCAASGFTFSDYNMAWVRQAPKKGLEWVATILYDGGRTYYRGSVKGRFTISRDNAKSTLYLRMDSLRSEDTATYYCATHSRGTDYFDYWGQGVMVTVSSTREQKLISEEDLAKPTTTPAPRPPTPAPTIASQPLSLRPEACRPAAGGAVHTRGLDFACDIYIWAPLAGTCGVLLLSLVITLYCGRARVKFSRSADAPAYQQGQNQLYNELNLGRREEYDVLDKRRGRDPEMGGKPRRKNPQEGLYNELQKDKMAEAYSEIGMKGERRRGKGHDGLYQGLSTATKDTYDALHMQALPPRSRGSGATNFSLLKQAGDVEENPGPGIHMATYEVLCEVARKLGTDDREVVLFLLNVFIPQPTLAQLIGALRALKEEGRLTFPLLAECLFRAGRRDLLRDLLHLDPRFLERHLAGTMSYFSPYQLTVLHVDGELCARDIRSLIFLSKDTIGSRSTPQTFLHWVYCMENLDLLGPTDVDALMSMLRSLSRVDLQRQVQTLMGLHLSGPSHSQHYRHTPLETDFYDYKDDDDKTSGSGEGRGSLLTCGDVEENPGPHMTEYKPTVRLATRDDVPRAVRTLAAAFADYPATRHTVDPDRHIERVTELQELFLTRVGLDIGKVWVADDGAAVAVWTTPESVEAGAVFAEIGPRMAELSGSRLAAQQQMEGLLAPHRPKEPAWFLATVGVSPDHQGKGLGSAVVLPGVEAAERAGVPAFLETSAPRNLPFYERLGFTVTADVEVPEGPRTWCMTRKPGA

SEQ ID NO: 2754 - protein, 921 aa, Artificial Sequence
  Synthetic Polypeptide
MALPVTALLLPLALLLHAARPDIVMTQSPSSLAVSEGETVTINCKSSQSFLSSGDGKNYVAWYQYKPGQSPKLLIYWASTRQSGVPDRFIGSGSGTDFTLTISTVQAEDLAIYYCQQYYDTPLTFGSGTKLEIKGGGGSGGGGSGGGGSEVKLQESGPSLVQSSQTLSLTCTVSGFSLTSYHIHWVRQTPGKGLEWMGVMWSDGDTSYNSALKSRLSISRDTSQSQVFLKMNSLQTEDTATYYCARGYYSSYLYLWFAYWGQGTLVTVSSTREQKLISEEDLAKPTTTPAPRPPTPAPTIASQPLSLRPEACRPAAGGAVHTRGLDFACDIYIWAPLAGTCGVLLLSLVITLYCGRARVKFSRSADAPAYQQGQNQLYNELNLGRREEYDVLDKRRGRDPEMGGKPRRKNPQEGLYNELQKDKMAEAYSEIGMKGERRRGKGHDGLYQGLSTATKDTYDALHMQALPPRSRGSGATNFSLLKQAGDVEENPGPGIHMATYEVLCEVARKLGTDDREVVLFLLNVFIPQPTLAQLIGALRALKEEGRLTFPLLAECLFRAGRRDLLRDLLHLDPRFLERHLAGTMSYFSPYQLTVLHVDGELCARDIRSLIFLSKDTIGSRSTPQTFLHWVYCMENLDLLGPTDVDALMSMLRSLSRVDLQRQVQTLMGLHLSGPSHSQHYRHTPLETDFYDYKDDDDKTSGSGEGRGSLLTCGDVEENPGPHMTEYKPTVRLATRDDVPRAVRTLAAAFADYPATRHTVDPDRHIERVTELQELFLTRVGLDIGKVWVADDGAAVAVWTTPESVEAGAVFAEIGPRMAELSGSRLAAQQQMEGLLAPHRPKEPAWFLATVGVSPDHQGKGLGSAVVLPGVEAAERAGVPAFLETSAPRNLPFYERLGFTVTADVEVPEGPRTWCMTRKPGA

SEQ ID NO: 2755 - protein, 925 aa, Artificial Sequence
  Synthetic Polypeptide
MALPVTALLLPLALLLHAARPDVLMTQTPVSLPVSLGGQVSISCRSSQSLVHSDGDTYLHWYLQKPGQSPQLLIYRVSNRFSGVPDRFSGSGSGTDFTLKISRVEPEDLGLYYCLQTTHFPPWTFGGGTKLEMKGGGGSGGGGSGGGGSQVQLQQSGPELRRPGSSVRLSCKASGYRIKDFLIHWIKNRPEHGLEWIGWIDPEDGETKYAQKFQTKATLTADTSSNTAYMQLSSLTSEDTATYFCARWGDVYYGLMRGHVMDAWGQGTSVTVSSTREQKLISEEDLAKPTTTPAPRPPTPAPTIASQPLSLRPEACRPAAGGAVHTRGLDFACDIYIWAPLAGTCGVLLLSLVITLYCGRARVKFSRSADAPAYQQGQNQLYNELNLGRREEYDVLDKRRGRDPEMGGKPRRKNPQEGLYNELQKDKMAEAYSEIGMKGERRRGKGHDGLYQGLSTATKDTYDALHMQALPPRSRGSGATNFSLLKQAGDVEENPGPGIHMATYEVLCEVARKLGTDDREVVLFLLNVFIPQPTLAQLIGALRALKEEGRLTFPLLAECLFRAGRRDLLRDLLHLDPRFLERHLAGTMSYFSPYQLTVLHVDGELCARDIRSLIFLSKDTIGSRSTPQTFLHWVYCMENLDLLGPTDVDALMSMLRSLSRVDLQRQVQTLMGLHLSGPSHSQHYRHTPLETDFYDYKDDDDKTSGSGEGRGSLLTCGDVEENPGPHMTEYKPTVRLATRDDVPRAVRTLAAAFADYPATRHTVDPDRHIERVTELQELFLTRVGLDIGKVWVADDGAAVAVWTTPESVEAGAVFAEIGPRMAELSGSRLAAQQQMEGLLAPHRPKEPAWFLATVGVSPDHQGKGLGSAVVLPGVEAAERAGVPAFLETSAPRNLPFYERLGFTVTADVEVPEGPRTWCMTRKPGA

SEQ ID NO: 2756 - protein, 916 aa, Artificial Sequence
  Synthetic Polypeptide
MALPVTALLLPLALLLHAARPDIQMTQSTSSLSASLGDRVTISCSASQGINNYLNWYQQKPDGTVELLIYYTSTLQSGVPSRFSGSGSGTDYSLTISNLEPEDIGTYYCQQYSKLPRTFGGGTKLEIKGGGGSGGGGSGGGGSQVQLQQSGSELMMPGASVKISCKATGYTFSNYWIEWVKQRPGHGLEWIGEILPGTGRTIYNEKFKGKATFTADISSNTVQMQLSSLTSEDSAVYYCARRDYYGNFYYAMDYWGQGTSVTVSSTREQKLISEEDLAKPTTTPAPRPPTPAPTIASQPLSLRPEACRPAAGGAVHTRGLDFACDIYIWAPLAGTCGVLLLSLVITLYCGRARVKFSRSADAPAYQQGQNQLYNELNLGRREEYDVLDKRRGRDPEMGGKPRRKNPQEGLYNELQKDKMAEAYSEIGMKGERRRGKGHDGLYQGLSTATKDTYDALHMQALPPRSRGSGATNFSLLKQAGDVEENPGPGIHMATYEVLCEVARKLGTDDREVVLFLLNVFIPQPTLAQLIGALRALKEEGRLTFPLLAECLFRAGRRDLLRDLLHLDPRFLERHLAGTMSYFSPYQLTVLHVDGELCARDIRSLIFLSKDTIGSRSTPQTFLHWVYCMENLDLLGPTDVDALMSMLRSLSRVDLQRQVQTLMGLHLSGPSHSQHYRHTPLETDFYDYKDDDDKTSGSGEGRGSLLTCGDVEENPGPHMTEYKPTVRLATRDDVPRAVRTLAAAFADYPATRHTVDPDRHIERVTELQELFLTRVGLDIGKVWVADDGAAVAVWTTPESVEAGAVFAEIGPRMAELSGSRLAAQQQMEGLLAPHRPKEPAWFLATVGVSPDHQGKGLGSAVVLPGVEAAERAGVPAFLETSAPRNLPFYERLGFTVTADVEVPEGPRTWCMTRKPGA

SEQ ID NO: 2757 - protein, 911 aa, Artificial Sequence
  Synthetic Polypeptide
MALPVTALLLPLALLLHAARPDIQMTQSPASLSVSVGETVTITCRASENIYSNLAWYQQKQGKSPQLLVYAATNLADGVPSRFSGSGSGTQYSLKINSLQSEDFGSYYCQHFWGTWTFGGGTTLEIKGGGGSGGGGSGGGGSEVQLQQSGPELVKPGASVKMSCKASGYTFTDYYMKWMKQSHGKSLEWIGDINPNNGGTTYNQKFKGKATLTVDKSSSTAYMQLNSLTSEDSAVYYCARDYGYGYFDYWGQGTTLTVSSTREQKLISEEDLAKPTTTPAPRPPTPAPTIASQPLSLRPEACRPAAGGAVHTRGLDFACDIYIWAPLAGTCGVLLLSLVITLYCGRARVKFSRSADAPAYQQGQNQLYNELNLGRREEYDVLDKRRGRDPEMGGKPRRKNPQEGLYNELQKDKMAEAYSEIGMKGERRRGKGHDGLYQGLSTATKDTYDALHMQALPPRSRGSGATNFSLLKQAGDVEENPGPGIHMATYEVLCEVARKLGTDDREVVLFLLNVFIPQPTLAQLIGALRALKEEGRLTFPLLAECLFRAGRRDLLRDLLHLDPRFLERHLAGTMSYFSPYQLTVLHVDGELCARDIRSLIFLSKDTIGSRSTPQTFLHWVYCMENLDLLGPTDVDALMSMLRSLSRVDLQRQVQTLMGLHLSGPSHSQHYRHTPLETDFYDYKDDDDKTSGSGEGRGSLLTCGDVEENPGPHMTEYKPTVRLATRDDVPRAVRTLAAAFADYPATRHTVDPDRHIERVTELQELFLTRVGLDIGKVWVADDGAAVAVWTTPESVEAGAVFAEIGPRMAELSGSRLAAQQQMEGLLAPHRPKEPAWFLATVGVSPDHQGKGLGSAVVLPGVEAAERAGVPAFLETSAPRNLPFYERLGFTVTADVEVPEGPRTWCMTRKPGA

SEQ ID NO: 2758 - protein, 914 aa, Artificial Sequence
  Synthetic Polypeptide
MALPVTALLLPLALLLHAARPEIVLTQSPGTLSLSPGERATLSCRASQSVGGYLAWYQQKPGQAPRLLIYDASNRATGIPARFSGSGSGTDFTLTISSLEPEDFAVYYCQQRNNWPPMYTFGQGTKLEIKRGGGGSGGGGSGGGGSQVQLVQSGAEVKKPGSSVKVSCKASGGTFSSYAISWVRQAPGQGLEWMGGIIPILGTANYAQKFQGRVTITADESTSTAYMELSSLRSEDTAVYYCARWGGGAFDIWGQGTMVTVSSTREQKLISEEDLAKPTTTPAPRPPTPAPTIASQPLSLRPEACRPAAGGAVHTRGLDFACDIYIWAPLAGTCGVLLLSLVITLYCGRARVKFSRSADAPAYQQGQNQLYNELNLGRREEYDVLDKRRGRDPEMGGKPRRKNPQEGLYNELQKDKMAEAYSEIGMKGERRRGKGHDGLYQGLSTATKDTYDALHMQALPPRSRGSGATNFSLLKQAGDVEENPGPGIHMATYEVLCEVARKLGTDDREVVLFLLNVFIPQPTLAQLIGALRALKEEGRLTFPLLAECLFRAGRRDLLRDLLHLDPRFLERHLAGTMSYFSPYQLTVLHVDGELCARDIRSLIFLSKDTIGSRSTPQTFLHWVYCMENLDLLGPTDVDALMSMLRSLSRVDLQRQVQTLMGLHLSGPSHSQHYRHTPLETDFYDYKDDDDKTSGSGEGRGSLLTCGDVEENPGPHMTEYKPTVRLATRDDVPRAVRTLAAAFADYPATRHTVDPDRHIERVTELQELFLTRVGLDIGKVWVADDGAAVAVWTTPESVEAGAVFAEIGPRMAELSGSRLAAQQQMEGLLAPHRPKEPAWFLATVGVSPDHQGKGLGSAVVLPGVEAAERAGVPAFLETSAPRNLPFYERLGFTVTADVEVPEGPRTWCMTRKPGA

SEQ ID NO: 2759 - protein, 909 aa, Artificial Sequence
  Synthetic Polypeptide
MALPVTALLLPLALLLHAARPQIVLTQSPALMSASPGEKVTMTCSASSSVRYMYWYQQKPRSSPKPWIHLTSNLASGVPARFSGSGSGTSYSLTISSMEAEDAATYYCQQWSSHPFTFGSGTKLEIKGGGGSGGGGSGGGGSDVQLQESGPGLVKPSQSLSLTCTVTGFSITSDYSWNWIRQFPGNKLEWMGYISYSGHTSYNPSLESRISITRDTSKNQFFLQLNSVTTEDTATYYCTRGNWDVVYWGQGTLVTVSATREQKLISEEDLAKPTTTPAPRPPTPAPTIASQPLSLRPEACRPAAGGAVHTRGLDFACDIYIWAPLAGTCGVLLLSLVITLYCGRARVKFSRSADAPAYQQGQNQLYNELNLGRREEYDVLDKRRGRDPEMGGKPRRKNPQEGLYNELQKDKMAEAYSEIGMKGERRRGKGHDGLYQGLSTATKDTYDALHMQALPPRSRGSGATNFSLLKQAGDVEENPGPGIHMATYEVLCEVARKLGTDDREVVLFLLNVFIPQPTLAQLIGALRALKEEGRLTFPLLAECLFRAGRRDLLRDLLHLDPRFLERHLAGTMSYFSPYQLTVLHVDGELCARDIRSLIFLSKDTIGSRSTPQTFLHWVYCMENLDLLGPTDVDALMSMLRSLSRVDLQRQVQTLMGLHLSGPSHSQHYRHTPLETDFYDYKDDDDKTSGSGEGRGSLLTCGDVEENPGPHMTEYKPTVRLATRDDVPRAVRTLAAAFADYPATRHTVDPDRHIERVTELQELFLTRVGLDIGKVWVADDGAAVAVWTTPESVEAGAVFAEIGPRMAELSGSRLAAQQQMEGLLAPHRPKEPAWFLATVGVSPDHQGKGLGSAVVLPGVEAAERAGVPAFLETSAPRNLPFYERLGFTVTADVEVPEGPRTWCMTRKPGA

SEQ ID NO: 2760 - protein, 919 aa, Artificial Sequence
  Synthetic Polypeptide
MALPVTALLLPLALLLHAARPDVVMTQSPLSLPVTLGQPASISCRSSQSIVHSDGNTYLEWYQQRPGQSPRRLIYKVSNRFSGVPDRFSGSGSGTDFTLKISRVEAEDVGVYYCFQGSHAPWTFGGGTKVEIKGGGGSGGGGSGGGGSEVQLVESGGGLVQPGGSLRLSCAASGFTFSSYGMHWVRQAPGKGLEWVAYITTRSSTIYYADSVKGRFTISRDNAKNSLYLQMNSLRAEDTAVYYCTREPLTGYYAMDYWGQGTSVTVSSTREQKLISEEDLAKPTTTPAPRPPTPAPTIASQPLSLRPEACRPAAGGAVHTRGLDFACDIYIWAPLAGTCGVLLLSLVITLYCGRARVKFSRSADAPAYQQGQNQLYNELNLGRREEYDVLDKRRGRDPEMGGKPRRKNPQEGLYNELQKDKMAEAYSEIGMKGERRRGKGHDGLYQGLSTATKDTYDALHMQALPPRSRGSGATNFSLLKQAGDVEENPGPGIHMATYEVLCEVARKLGTDDREVVLFLLNVFIPQPTLAQLIGALRALKEEGRLTFPLLAECLFRAGRRDLLRDLLHLDPRFLERHLAGTMSYFSPYQLTVLHVDGELCARDIRSLIFLSKDTIGSRSTPQTFLHWVYCMENLDLLGPTDVDALMSMLRSLSRVDLQRQVQTLMGLHLSGPSHSQHYRHTPLETDFYDYKDDDDKTSGSGEGRGSLLTCGDVEENPGPHMTEYKPTVRLATRDDVPRAVRTLAAAFADYPATRHTVDPDRHIERVTELQELFLTRVGLDIGKVWVADDGAAVAVWTTPESVEAGAVFAEIGPRMAELSGSRLAAQQQMEGLLAPHRPKEPAWFLATVGVSPDHQGKGLGSAVVLPGVEAAERAGVPAFLETSAPRNLPFYERLGFTVTADVEVPEGPRTWCMTRKPGA

SEQ ID NO: 2761 - protein, 911 aa, Artificial Sequence
  Synthetic Polypeptide
MALPVTALLLPLALLLHAARPDIQMTQSPSSLSASVGDRVTITCRASQSISLWLNWYQQKPGKAPKLLIYAASTLQSGVPSRFSGSGSGTDFTLTISSLQPEDFATYYCQQYYTSPYTFGQGTKVEIKRGGGGSGGGGSGGGGSQVQLLESGGGLVQPGGSLRLSCAASGFTFSSYAMSWVRQAPGKGLEWVSVIRSSGSSTYYADSVKGRFTISRDNSKNTLYLQMNSLRAEDTAVYYCARGGGYFDYWGQGTLVTVSSTREQKLISEEDLAKPTTTPAPRPPTPAPTIASQPLSLRPEACRPAAGGAVHTRGLDFACDIYIWAPLAGTCGVLLLSLVITLYCGRARVKFSRSADAPAYQQGQNQLYNELNLGRREEYDVLDKRRGRDPEMGGKPRRKNPQEGLYNELQKDKMAEAYSEIGMKGERRRGKGHDGLYQGLSTATKDTYDALHMQALPPRSRGSGATNFSLLKQAGDVEENPGPGIHMATYEVLCEVARKLGTDDREVVLFLLNVFIPQPTLAQLIGALRALKEEGRLTFPLLAECLFRAGRRDLLRDLLHLDPRFLERHLAGTMSYFSPYQLTVLHVDGELCARDIRSLIFLSKDTIGSRSTPQTFLHWVYCMENLDLLGPTDVDALMSMLRSLSRVDLQRQVQTLMGLHLSGPSHSQHYRHTPLETDFYDYKDDDDKTSGSGEGRGSLLTCGDVEENPGPHMTEYKPTVRLATRDDVPRAVRTLAAAFADYPATRHTVDPDRHIERVTELQELFLTRVGLDIGKVWVADDGAAVAVWTTPESVEAGAVFAEIGPRMAELSGSRLAAQQQMEGLLAPHRPKEPAWFLATVGVSPDHQGKGLGSAVVLPGVEAAERAGVPAFLETSAPRNLPFYERLGFTVTADVEVPEGPRTWCMTRKPGA

SEQ ID NO: 2762 - protein, 914 aa, Artificial Sequence
  Synthetic Polypeptide
MALPVTALLLPLALLLHAARPDIQMTQSPSSLSASVGDRVTITCRASQSISSYLNWYQQKPGKAPKLLIYAVSTLQSGVPSRFSGSGSGTDFTLTISSLQPEDFATYYCQQSGTFPPTTFGQGTKVEIKRGGGGSGGGGSGGGGSQVQLLESGGGLVQPGGSLRLSCAASGFTFSSHGMHWVRQAPGKGLEWVSVISGSGSNTGYADSVKGRFTISRDNSKNTLYLQMNSLRAEDTAVYYCARQWGSYAFDSWGQGTLVTVSSTREQKLISEEDLAKPTTTPAPRPPTPAPTIASQPLSLRPEACRPAAGGAVHTRGLDFACDIYIWAPLAGTCGVLLLSLVITLYCGRARVKFSRSADAPAYQQGQNQLYNELNLGRREEYDVLDKRRGRDPEMGGKPRRKNPQEGLYNELQKDKMAEAYSEIGMKGERRRGKGHDGLYQGLSTATKDTYDALHMQALPPRSRGSGATNFSLLKQAGDVEENPGPGIHMATYEVLCEVARKLGTDDREVVLFLLNVFIPQPTLAQLIGALRALKEEGRLTFPLLAECLFRAGRRDLLRDLLHLDPRFLERHLAGTMSYFSPYQLTVLHVDGELCARDIRSLIFLSKDTIGSRSTPQTFLHWVYCMENLDLLGPTDVDALMSMLRSLSRVDLQRQVQTLMGLHLSGPSHSQHYRHTPLETDFYDYKDDDDKTSGSGEGRGSLLTCGDVEENPGPHMTEYKPTVRLATRDDVPRAVRTLAAAFADYPATRHTVDPDRHIERVTELQELFLTRVGLDIGKVWVADDGAAVAVWTTPESVEAGAVFAEIGPRMAELSGSRLAAQQQMEGLLAPHRPKEPAWFLATVGVSPDHQGKGLGSAVVLPGVEAAERAGVPAFLETSAPRNLPFYERLGFTVTADVEVPEGPRTWCMTRKPGA

SEQ ID NO: 2763 - protein, 924 aa, Artificial Sequence
  Synthetic Polypeptide
MALPVTALLLPLALLLHAARPDIVMSQSPSSLAVSVGEKVTMSCKSSQSLLHSSNQKNYLAWYQQKPGQSPKVLIYWASTRESGVPDRFTGSGSGTDFTLTITSVKSEDLAVYYCQQYYSYPWTFGGGTRLEIKRGGGGSGGGGSGGGGSEVQLQQSVAELVKPGASVKMSCKVSGYTLTDHTIHWMKQRPEQGLEWIGYIYPRDGITGYNEKFKGKATLTADTSSSTAYMQLNSLTSEDSAVYFCARWGYSYRNYAYYYDYWGQGTTLTVSSTREQKLISEEDLAKPTTTPAPRPPTPAPTIASQPLSLRPEACRPAAGGAVHTRGLDFACDIYIWAPLAGTCGVLLLSLVITLYCGRARVKFSRSADAPAYQQGQNQLYNELNLGRREEYDVLDKRRGRDPEMGGKPRRKNPQEGLYNELQKDKMAEAYSEIGMKGERRRGKGHDGLYQGLSTATKDTYDALHMQALPPRSRGSGATNFSLLKQAGDVEENPGPGIHMATYEVLCEVARKLGTDDREVVLFLLNVFIPQPTLAQLIGALRALKEEGRLTFPLLAECLFRAGRRDLLRDLLHLDPRFLERHLAGTMSYFSPYQLTVLHVDGELCARDIRSLIFLSKDTIGSRSTPQTFLHWVYCMENLDLLGPTDVDALMSMLRSLSRVDLQRQVQTLMGLHLSGPSHSQHYRHTPLETDFYDYKDDDDKTSGSGEGRGSLLTCGDVEENPGPHMTEYKPTVRLATRDDVPRAVRTLAAAFADYPATRHTVDPDRHIERVTELQELFLTRVGLDIGKVWVADDGAAVAVWTTPESVEAGAVFAEIGPRMAELSGSRLAAQQQMEGLLAPHRPKEPAWFLATVGVSPDHQGKGLGSAVVLPGVEAAERAGVPAFLETSAPRNLPFYERLGFTVTADVEVPEGPRTWCMTRKPGA

SEQ ID NO: 2764 - protein, 921 aa, Artificial Sequence
  Synthetic Polypeptide
MALPVTALLLPLALLLHAARPEIVLTQSPGTLSLSPGERATLSCRASQSVSSSYLAWYQQKPGQAPRLLIYGTSSRATGIPDRFSGSGSGTDFTLTISRLEPEDFAVYYCQQYGSSPFTFGGGTKVEIKRGGGGSGGGGSGGGGSQVQLQESGPGLAKPSETLSLTCTVSGDSITSYYWSWIRQPPGKGLEWIGYIYYSGSTNYNPSLKSRVTISVDTSKNQFSLKLSSVTAADTAVYYCARDQRRIAAAGTHFYGMDVWGQGTTVTVSSTREQKLISEEDLAKPTTTPAPRPPTPAPTIASQPLSLRPEACRPAAGGAVHTRGLDFACDIYIWAPLAGTCGVLLLSLVITLYCGRARVKFSRSADAPAYQQGQNQLYNELNLGRREEYDVLDKRRGRDPEMGGKPRRKNPQEGLYNELQKDKMAEAYSEIGMKGERRRGKGHDGLYQGLSTATKDTYDALHMQALPPRSRGSGATNFSLLKQAGDVEENPGPGIHMATYEVLCEVARKLGTDDREVVLFLLNVFIPQPTLAQLIGALRALKEEGRLTFPLLAECLFRAGRRDLLRDLLHLDPRFLERHLAGTMSYFSPYQLTVLHVDGELCARDIRSLIFLSKDTIGSRSTPQTFLHWVYCMENLDLLGPTDVDALMSMLRSLSRVDLQRQVQTLMGLHLSGPSHSQHYRHTPLETDFYDYKDDDDKTSGSGEGRGSLLTCGDVEENPGPHMTEYKPTVRLATRDDVPRAVRTLAAAFADYPATRHTVDPDRHIERVTELQELFLTRVGLDIGKVWVADDGAAVAVWTTPESVEAGAVFAEIGPRMAELSGSRLAAQQQMEGLLAPHRPKEPAWFLATVGVSPDHQGKGLGSAVVLPGVEAAERAGVPAFLETSAPRNLPFYERLGFTVTADVEVPEGPRTWCMTRKPGA

SEQ ID NO: 2765 - protein, 913 aa, Artificial Sequence
  Synthetic Polypeptide
MALPVTALLLPLALLLHAARPDILLTQSPVILSVSPGERVSFSCRASQSIGTNIHWYQQRTNGSPRLLIKYASESISGIPSRFSGSGSGTDFTLSINSVESEDIADYYCQQNNNWPTTFGAGTKLELKGGGGSGGGGSGGGGSQVQLKQSGPGLVQPSQSLSITCTVSGFSLTNYGVHWVRQSPGKGLEWLGVIWSGGNTDYNTPFTSRLSINKDNSKSQVFFKMNSLQSNDTAIYYCARALTYYDYEFAYWGQGTLVTVSATREQKLISEEDLAKPTTTPAPRPPTPAPTIASQPLSLRPEACRPAAGGAVHTRGLDFACDIYIWAPLAGTCGVLLLSLVITLYCGRARVKFSRSADAPAYQQGQNQLYNELNLGRREEYDVLDKRRGRDPEMGGKPRRKNPQEGLYNELQKDKMAEAYSEIGMKGERRRGKGHDGLYQGLSTATKDTYDALHMQALPPRSRGSGATNFSLLKQAGDVEENPGPGIHMATYEVLCEVARKLGTDDREVVLFLLNVFIPQPTLAQLIGALRALKEEGRLTFPLLAECLFRAGRRDLLRDLLHLDPRFLERHLAGTMSYFSPYQLTVLHVDGELCARDIRSLIFLSKDTIGSRSTPQTFLHWVYCMENLDLLGPTDVDALMSMLRSLSRVDLQRQVQTLMGLHLSGPSHSQHYRHTPLETDFYDYKDDDDKTSGSGEGRGSLLTCGDVEENPGPHMTEYKPTVRLATRDDVPRAVRTLAAAFADYPATRHTVDPDRHIERVTELQELFLTRVGLDIGKVWVADDGAAVAVWTTPESVEAGAVFAEIGPRMAELSGSRLAAQQQMEGLLAPHRPKEPAWFLATVGVSPDHQGKGLGSAVVLPGVEAAERAGVPAFLETSAPRNLPFYERLGFTVTADVEVPEGPRTWCMTRKPGA

SEQ ID NO: 2766 - protein, 906 aa, Artificial Sequence
  Synthetic Polypeptide
MALPVTALLLPLALLLHAARPMTQSPKFLLVSAGDRVTLTCKASQSVNNDVYWYQQEPGQSPKLLIYWASTRESGVPDRFTGSGSGTDFTLTISSVQAEDLAVYYCKQSYNLYTFGGGTKLEIKRGGGGSGGGGSGGGGSESGRGLVQPGGSRKLSCAASGFTFSTSGMHWVRQAPEKGLEWVAYISSGSTTIYHADTVKGRFTISRDNPKNTLFLQMTSLRSEDTAMYYCCARSGQFGNYFDYWGQGTTLTVSSTREQKLISEEDLAKPTTTPAPRPPTPAPTIASQPLSLRPEACRPAAGGAVHTRGLDFACDIYIWAPLAGTCGVLLLSLVITLYCGRARVKFSRSADAPAYQQGQNQLYNELNLGRREEYDVLDKRRGRDPEMGGKPRRKNPQEGLYNELQKDKMAEAYSEIGMKGERRRGKGHDGLYQGLSTATKDTYDALHMQALPPRSRGSGATNFSLLKQAGDVEENPGPGIHMATYEVLCEVARKLGTDDREVVLFLLNVFIPQPTLAQLIGALRALKEEGRLTFPLLAECLFRAGRRDLLRDLLHLDPRFLERHLAGTMSYFSPYQLTVLHVDGELCARDIRSLIFLSKDTIGSRSTPQTFLHWVYCMENLDLLGPTDVDALMSMLRSLSRVDLQRQVQTLMGLHLSGPSHSQHYRHTPLETDFYDYKDDDDKTSGSGEGRGSLLTCGDVEENPGPHMTEYKPTVRLATRDDVPRAVRTLAAAFADYPATRHTVDPDRHIERVTELQELFLTRVGLDIGKVWVADDGAAVAVWTTPESVEAGAVFAEIGPRMAELSGSRLAAQQQMEGLLAPHRPKEPAWFLATVGVSPDHQGKGLGSAVVLPGVEAAERAGVPAFLETSAPRNLPFYERLGFTVTADVEVPEGPRTWCMTRKPGA

SEQ ID NO: 2767 - protein, 911 aa, Artificial Sequence
  Synthetic Polypeptide
MALPVTALLLPLALLLHAARPQSPSSLAVSAGEKVTMSCKSSQSLLNSRTRKNYLAWYQQKPGQSPKLLIYWASTRESGVPDRFTGSGSGTDFTLTISSVQAEDLAVYYCKQSNLYTFGGGTKLEIKGGGGSGGGGSGGGGSQVQLEESGPELVKPGASVKLSCKASGYTFTEYIIHWVKQRSGQGLEWIGWFYPGSGSIKYNEKFKDKATLTADKSSSTVYMELSGLTSEDSAVYFCARHDGYSYFDYWGQGTTLTVSSTREQKLISEEDLAKPTTTPAPRPPTPAPTIASQPLSLRPEACRPAAGGAVHTRGLDFACDIYIWAPLAGTCGVLLLSLVITLYCGRARVKFSRSADAPAYQQGQNQLYNELNLGRREEYDVLDKRRGRDPEMGGKPRRKNPQEGLYNELQKDKMAEAYSEIGMKGERRRGKGHDGLYQGLSTATKDTYDALHMQALPPRSRGSGATNFSLLKQAGDVEENPGPGIHMATYEVLCEVARKLGTDDREVVLFLLNVFIPQPTLAQLIGALRALKEEGRLTFPLLAECLFRAGRRDLLRDLLHLDPRFLERHLAGTMSYFSPYQLTVLHVDGELCARDIRSLIFLSKDTIGSRSTPQTFLHWVYCMENLDLLGPTDVDALMSMLRSLSRVDLQRQVQTLMGLHLSGPSHSQHYRHTPLETDFYDYKDDDDKTSGSGEGRGSLLTCGDVEENPGPHMTEYKPTVRLATRDDVPRAVRTLAAAFADYPATRHTVDPDRHIERVTELQELFLTRVGLDIGKVWVADDGAAVAVWTTPESVEAGAVFAEIGPRMAELSGSRLAAQQQMEGLLAPHRPKEPAWFLATVGVSPDHQGKGLGSAVVLPGVEAAERAGVPAFLETSAPRNLPFYERLGFTVTADVEVPEGPRTWCMTRKPGA

SEQ ID NO: 2768 - protein, 923 aa, Artificial Sequence
  Synthetic Polypeptide
MEMFQGLLLLLLLSMGGTWASREMLRPRCRPINATLAVEKEGCPVCITVNTTICAGYCPTMTRVLQGVLPALPQVVCNYRDVRFESIRLPGCPRGVNPVVSYAVALSCQCALCRRSTTDCGGPKDHPLTCDDPRFQASSSSKAPPPSLPSPSRLPGPSDTPILPQGGGGSGGGGSGGGGSAPDVQDCPECTLQENPFFSQPGAPILQCMGCCFSRAYPTPLRSKKTMLVQKNVTSESTCCVAKSYNRVTVMGGFKVENHTACHCSTCYYHKSTREQKLISEEDLAKPTTTPAPRPPTPAPTIASQPLSLRPEACRPAAGGAVHTRGLDFACDIYIWAPLAGTCGVLLLSLVITLYCGRARVKFSRSADAPAYQQGQNQLYNELNLGRREEYDVLDKRRGRDPEMGGKPRRKNPQEGLYNELQKDKMAEAYSEIGMKGERRRGKGHDGLYQGLSTATKDTYDALHMQALPPRSRGSGATNFSLLKQAGDVEENPGPGIHMATYEVLCEVARKLGTDDREVVLFLLNVFIPQPTLAQLIGALRALKEEGRLTFPLLAECLFRAGRRDLLRDLLHLDPRFLERHLAGTMSYFSPYQLTVLHVDGELCARDIRSLIFLSKDTIGSRSTPQTFLHWVYCMENLDLLGPTDVDALMSMLRSLSRVDLQRQVQTLMGLHLSGPSHSQHYRHTPLETDFYDYKDDDDKTSGSGEGRGSLLTCGDVEENPGPHMTEYKPTVRLATRDDVPRAVRTLAAAFADYPATRHTVDPDRHIERVTELQELFLTRVGLDIGKVWVADDGAAVAVWTTPESVEAGAVFAEIGPRMAELSGSRLAAQQQMEGLLAPHRPKEPAWFLATVGVSPDHQGKGLGSAVVLPGVEAAERAGVPAFLETSAPRNLPFYERLGFTVTADVEVPEGPRTWCMTRKPGA

SEQ ID NO: 2769 - protein, 914 aa, Artificial Sequence
  Synthetic Polypeptide
MALPVTALLLPLALLLHAARPDIQMTQSPSSLSASLGERVSLTCRATQELSGYLSWLQQKPDGTIKRLIYAASTLDSGVPKRFSGNRSGSDYSLTISSLESEDFADYYCLQYAIYPYTFGGGTKLEIKGGGGSGGGGSGGGGSEVQLQQSGPELVKPGASVKMSCKASGYTFTSYFIHWVKQKPGQGLEWIGFINPYNDGSKYNEKFKGKATLTSDKSSSTAYMELSSLTSEDSAVYYCTRDDGYYGYAMDYWGQGTSVTVSSTREQKLISEEDLAKPTTTPAPRPPTPAPTIASQPLSLRPEACRPAAGGAVHTRGLDFACDIYIWAPLAGTCGVLLLSLVITLYCGRARVKFSRSADAPAYQQGQNQLYNELNLGRREEYDVLDKRRGRDPEMGGKPRRKNPQEGLYNELQKDKMAEAYSEIGMKGERRRGKGHDGLYQGLSTATKDTYDALHMQALPPRSRGSGATNFSLLKQAGDVEENPGPGIHMATYEVLCEVARKLGTDDREVVLFLLNVFIPQPTLAQLIGALRALKEEGRLTFPLLAECLFRAGRRDLLRDLLHLDPRFLERHLAGTMSYFSPYQLTVLHVDGELCARDIRSLIFLSKDTIGSRSTPQTFLHWVYCMENLDLLGPTDVDALMSMLRSLSRVDLQRQVQTLMGLHLSGPSHSQHYRHTPLETDFYDYKDDDDKTSGSGEGRGSLLTCGDVEENPGPHMTEYKPTVRLATRDDVPRAVRTLAAAFADYPATRHTVDPDRHIERVTELQELFLTRVGLDIGKVWVADDGAAVAVWTTPESVEAGAVFAEIGPRMAELSGSRLAAQQQMEGLLAPHRPKEPAWFLATVGVSPDHQGKGLGSAVVLPGVEAAERAGVPAFLETSAPRNLPFYERLGFTVTADVEVPEGPRTWCMTRKPGA

SEQ ID NO: 2770 - protein, 919 aa, Artificial Sequence
  Synthetic Polypeptide
MALPVTALLLPLALLLHAARPDTIVLTQSPASLAVSLGQRATISCRASESVDSYGNSFMHWYQQKPGQPPKLLIYLASNLESGVPARFSGSGSRTDFTLTIDPVEADDAATYYCQQNNYDPWTFGGGTKLEIKGGGGSGGGGSGGGGSEVQLQQSGPELVKPGASVKMSCKASGYTFTSYVMHWVKQKPGQGLEWIGYINPYNDGTKYNEKFKGKATLTSDTSSSTAYMELNSLTSEDSAVYFCARPIYFDNDYFDYWGQGTTLKVSSTREQKLISEEDLAKPTTTPAPRPPTPAPTIASQPLSLRPEACRPAAGGAVHTRGLDFACDIYIWAPLAGTCGVLLLSLVITLYCGRARVKFSRSADAPAYQQGQNQLYNELNLGRREEYDVLDKRRGRDPEMGGKPRRKNPQEGLYNELQKDKMAEAYSEIGMKGERRRGKGHDGLYQGLSTATKDTYDALHMQALPPRSRGSGATNFSLLKQAGDVEENPGPGIHMATYEVLCEVARKLGTDDREVVLFLLNVFIPQPTLAQLIGALRALKEEGRLTFPLLAECLFRAGRRDLLRDLLHLDPRFLERHLAGTMSYFSPYQLTVLHVDGELCARDIRSLIFLSKDTIGSRSTPQTFLHWVYCMENLDLLGPTDVDALMSMLRSLSRVDLQRQVQTLMGLHLSGPSHSQHYRHTPLETDFYDYKDDDDKTSGSGEGRGSLLTCGDVEENPGPHMTEYKPTVRLATRDDVPRAVRTLAAAFADYPATRHTVDPDRHIERVTELQELFLTRVGLDIGKVWVADDGAAVAVWTTPESVEAGAVFAEIGPRMAELSGSRLAAQQQMEGLLAPHRPKEPAWFLATVGVSPDHQGKGLGSAVVLPGVEAAERAGVPAFLETSAPRNLPFYERLGFTVTADVEVPEGPRTWCMTRKPGA

SEQ ID NO: 2771 - protein, 914 aa, Artificial Sequence
  Synthetic Polypeptide
MALPVTALLLPLALLLHAARPDIQMTQSPSSLSASVGDRVTITCKASQDVSTAVAWFQQKPGKAPKLLIYSPSYRYTGVPSRFSGSGSGTDFTLTISSLQPEDFTYYCQQLYSTPYTFGQGTKVEIKGGGGSGGGGSGGGGSEVQLVQSGAEVKKPGASVKVSCKASGYTFTDYYLDVVVRQAPGQGLEWIGRVNPYNGGTIYNQKFKGRVTLTRDTSTSTAYLELSSLRSEDTAVYYCARDHYRYDPLLDYWGQGTLVTVSSTREQKLISEEDLAKPTTTPAPRPPTPAPTIASQPLSLRPEACRPAAGGAVHTRGLDFACDIYIWAPLAGTCGVLLLSLVITLYCGRARVKFSRSADAPAYQQGQNQLYNELNLGRREEYDVLDKRRGRDPEMGGKPRRKNPQEGLYNELQKDKMAEAYSEIGMKGERRRGKGHDGLYQGLSTATKDTYDALHMQALPPRSRGSGATNFSLLKQAGDVEENPGPGIHMATYEVLCEVARKLGTDDREVVLFLLNVFIPQPTLAQLIGALRALKEEGRLTFPLLAECLFRAGRRDLLRDLLHLDPRFLERHLAGTMSYFSPYQLTVLHVDGELCARDIRSLIFLSKDTIGSRSTPQTFLHWVYCMENLDLLGPTDVDALMSMLRSLSRVDLQRQVQTLMGLHLSGPSHSQHYRHTPLETDFYDYKDDDDKTSGSGEGRGSLLTCGDVEENPGPHMTEYKPTVRLATRDDVPRAVRTLAAAFADYPATRHTVDPDRHIERVTELQELFLTRVGLDIGKVWVADDGAAVAVWTTPESVEAGAVFAEIGPRMAELSGSRLAAQQQMEGLLAPHRPKEPAWFLATVGVSPDHQGKGLGSAVVLPGVEAAERAGVPAFLETSAPRNLPFYERLGFTVTADVEVPEGPRTWCMTRKPGA

SEQ ID NO: 2772 - protein, 920 aa, Artificial Sequence
  Synthetic Polypeptide
MALPVTALLLPLALLLHAARPDIQMTQSPSSLSASVGDRVTITCRASQSVSTSSYNYMHWYQQKPGKPPKLLIKYASNLESGVPSRFSGSGSGTDFTLTISSLQPEDFATYYCQHSWEIPLTFGQGTKVEIKGGGGSGGGGSGGGGSEVQLVQSGAEVKKPGASVKVSCKASGYSFTDYYMHWVRQAPGQGLEWIGRINPYNGAAFYSQNFKDRVTLTVDTSTSTAYLELSSLRSEDTAVYYCAIERGADLEGYAMDYWGQGTLVTVSSTREQKLISEEDLAKPTTTPAPRPPTPAPTIASQPLSLRPEACRPAAGGAVHTRGLDFACDIYIWAPLAGTCGVLLLSLVITLYCGRARVKFSRSADAPAYQQGQNQLYNELNLGRREEYDVLDKRRGRDPEMGGKPRRKNPQEGLYNELQKDKMAEAYSEIGMKGERRRGKGHDGLYQGLSTATKDTYDALHMQALPPRSRGSGATNFSLLKQAGDVEENPGPGIHMATYEVLCEVARKLGTDDREVVLFLLNVFIPQPTLAQLIGALRALKEEGRLTFPLLAECLFRAGRRDLLRDLLHLDPRFLERHLAGTMSYFSPYQLTVLHVDGELCARDIRSLIFLSKDTIGSRSTPQTFLHWVYCMENLDLLGPTDVDALMSMLRSLSRVDLQRQVQTLMGLHLSGPSHSQHYRHTPLETDFYDYKDDDDKTSGSGEGRGSLLTCGDVEENPGPHMTEYKPTVRLATRDDVPRAVRTLAAAFADYPATRHTVDPDRHIERVTELQELFLTRVGLDIGKVWVADDGAAVAVWTTPESVEAGAVFAEIGPRMAELSGSRLAAQQQMEGLLAPHRPKEPAWFLATVGVSPDHQGKGLGSAVVLPGVEAAERAGVPAFLETSAPRNLPFYERLGFTVTADVEVPEGPRTWCMTRKPGA

SEQ ID NO: 2773 - protein, 918 aa, Artificial Sequence
  Synthetic Polypeptide
MALPVTALLLPLALLLHAARPEIVLTQSPATLSASPGERVTLTCRASSNVISSYVHWYQQKPGSSPRLFLYSTSNLASGVPSRFSGSGSGTDFTFTISSLEAEDAATYYCQQYSGYPLTFGQGTRLEIKGGGGSGGGGSGGGGSQVQLQESGPGLVKPSETLSLTCAVSGYSITSAYYWNWIRQPPGKGLEWIGYISYDGRNNYNPSLKNRITINPDTSKNQFSLQLNSVTPEDTAVYYCAREGDYDVGNYYAMDYWGQGTLVTVSSTREQKLISEEDLAKPTTTPAPRPPTPAPTIASQPLSLRPEACRPAAGGAVHTRGLDFACDIYIWAPLAGTCGVLLLSLVITLYCGRARVKFSRSADAPAYQQGQNQLYNELNLGRREEYDVLDKRRGRDPEMGGKPRRKNPQEGLYNELQKDKMAEAYSEIGMKGERRRGKGHDGLYQGLSTATKDTYDALHMQALPPRSRGSGATNFSLLKQAGDVEENPGPGIHMATYEVLCEVARKLGTDDREVVLFLLNVFIPQPTLAQLIGALRALKEEGRLTFPLLAECLFRAGRRDLLRDLLHLDPRFLERHLAGTMSYFSPYQLTVLHVDGELCARDIRSLIFLSKDTIGSRSTPQTFLHWVYCMENLDLLGPTDVDALMSMLRSLSRVDLQRQVQTLMGLHLSGPSHSQHYRHTPLETDFYDYKDDDDKTSGSGEGRGSLLTCGDVEENPGPHMTEYKPTVRLATRDDVPRAVRTLAAAFADYPATRHTVDPDRHIERVTELQELFLTRVGLDIGKVWVADDGAAVAVWTTPESVEAGAVFAEIGPRMAELSGSRLAAQQQMEGLLAPHRPKEPAWFLATVGVSPDHQGKGLGSAVVLPGVEAAERAGVPAFLETSAPRNLPFYERLGFTVTADVEVPEGPRTWCMTRKPGA

SEQ ID NO: 2774 - protein, 918 aa, Artificial Sequence
  Synthetic Polypeptide
MALPVTALLLPLALLLHAARPEIVLTQSPATLSLSPGERATLSCRASSNVISSYVHWYQQKPGQAPRLLIYSTSNLASGIPARFSGSGSGTDFTLTISSLEPEDFAVYYCQQYSGYPLTFGQGTRLEIKGGGGSGGGGSGGGGSEVQLVESGGGLVQPGRSLRLSCAASGYSITSAYYWNWVRQAPGKGLEWVSYISYDGRNNYNPSLKNRFTISRDNAKKSLYLQMNSLRAEDTALYYCAKEGDYDVGNYYAMDYWGQGTTVTVSSTREQKLISEEDLAKPTTTPAPRPPTPAPTIASQPLSLRPEACRPAAGGAVHTRGLDFACDIYIWAPLAGTCGVLLLSLVITLYCGRARVKFSRSADAPAYQQGQNQLYNELNLGRREEYDVLDKRRGRDPEMGGKPRRKNPQEGLYNELQKDKMAEAYSEIGMKGERRRGKGHDGLYQGLSTATKDTYDALHMQALPPRSRGSGATNFSLLKQAGDVEENPGPGIHMATYEVLCEVARKLGTDDREVVLFLLNVFIPQPTLAQLIGALRALKEEGRLTFPLLAECLFRAGRRDLLRDLLHLDPRFLERHLAGTMSYFSPYQLTVLHVDGELCARDIRSLIFLSKDTIGSRSTPQTFLHWVYCMENLDLLGPTDVDALMSMLRSLSRVDLQRQVQTLMGLHLSGPSHSQHYRHTPLETDFYDYKDDDDKTSGSGEGRGSLLTCGDVEENPGPHMTEYKPTVRLATRDDVPRAVRTLAAAFADYPATRHTVDPDRHIERVTELQELFLTRVGLDIGKVWVADDGAAVAVWTTPESVEAGAVFAEIGPRMAELSGSRLAAQQQMEGLLAPHRPKEPAWFLATVGVSPDHQGKGLGSAVVLPGVEAAERAGVPAFLETSAPRNLPFYERLGFTVTADVEVPEGPRTWCMTRKPGA

SEQ ID NO: 2775 - protein, 930 aa, Artificial Sequence
  Synthetic Polypeptide
MALPVTALLLPLALLLHAARPDLNFMLTQPHSVSGSPGKTVTISCTRSTGSITSNYVHWYQQRPGSSPTTVICEDNERPSGVPDRFSGSIDISSNSASLTISGLKTEDEADYYCQSYDDSNHISVFGTGTKVTVLGQPKANPGGGGSGGGGSGGGGSQVQLQESGPGLVKPSETLSLTCTVSGGSISSSNYYWGWIRQPPGKGLEWIGAIYYSGSTYYNPSLKSRVAISVDTSKNQFSLKLSSVTAADTAVYYCARRIGVAGQWYFDLWGRGTLVTVSSTREQKLISEEDLAKPTTTPAPRPPTPAPTIASQPLSLRPEACRPAAGGAVHTRGLDFACDIYIWAPLAGTCGVLLLSLVITLYCGRARVKFSRSADAPAYQQGQNQLYNELNLGRREEYDVLDKRRGRDPEMGGKPRRKNPQEGLYNELQKDKMAEAYSEIGMKGERRRGKGHDGLYQGLSTATKDTYDALHMQALPPRSRGSGATNFSLLKQAGDVEENPGPGIHMATYEVLCEVARKLGTDDREVVLFLLNVFIPQPTLAQLIGALRALKEEGRLTFPLLAECLFRAGRRDLLRDLLHLDPRFLERHLAGTMSYFSPYQLTVLHVDGELCARDIRSLIFLSKDTIGSRSTPQTFLHWVYCMENLDLLGPTDVDALMSMLRSLSRVDLQRQVQTLMGLHLSGPSHSQHYRHTPLETDFYDYKDDDDKTSGSGEGRGSLLTCGDVEENPGPHMTEYKPTVRLATRDDVPRAVRTLAAAFADYPATRHTVDPDRHIERVTELQELFLTRVGLDIGKVWVADDGAAVAVWTTPESVEAGAVFAEIGPRMAELSGSRLAAQQQMEGLLAPHRPKEPAWFLATVGVSPDHQGKGLGSAVVLPGVEAAERAGVPAFLETSAPRNLPFYERLGFTVTADVEVPEGPRTWCMTRKPGA

SEQ ID NO: 2776 - protein, 916 aa, Artificial Sequence
  Synthetic Polypeptide
MALPVTALLLPLALLLHAARPDIQMTQSPSSLSASVGDRVTITCKASQDVGIAVAWYQQKPGKVPKLLIYWASTRHTGVPDRFSGSGSGTDFTLTISSLQPEDVATYYCQQYSSYPYTFGQGTKVEIKGGGGSGGGGSGGGGSQIQLVQSGPDLKKPGETVKISCKASGYTFTNTGMNWVKQAPGKGLKWMGWINTYTGEPTYADDFKGRFTFSLETSASTAYLQINNLKNEDTATYFCTRWGYGSSLYYAMDYWGQGTSVTVSSTREQKLISEEDLAKPTTTPAPRPPTPAPTIASQPLSLRPEACRPAAGGAVHTRGLDFACDIYIWAPLAGTCGVLLLSLVITLYCGRARVKFSRSADAPAYQQGQNQLYNELNLGRREEYDVLDKRRGRDPEMGGKPRRKNPQEGLYNELQKDKMAEAYSEIGMKGERRRGKGHDGLYQGLSTATKDTYDALHMQALPPRSRGSGATNFSLLKQAGDVEENPGPGIHMATYEVLCEVARKLGTDDREVVLFLLNVFIPQPTLAQLIGALRALKEEGRLTFPLLAECLFRAGRRDLLRDLLHLDPRFLERHLAGTMSYFSPYQLTVLHVDGELCARDIRSLIFLSKDTIGSRSTPQTFLHWVYCMENLDLLGPTDVDALMSMLRSLSRVDLQRQVQTLMGLHLSGPSHSQHYRHTPLETDFYDYKDDDDKTSGSGEGRGSLLTCGDVEENPGPHMTEYKPTVRLATRDDVPRAVRTLAAAFADYPATRHTVDPDRHIERVTELQELFLTRVGLDIGKVWVADDGAAVAVWTTPESVEAGAVFAEIGPRMAELSGSRLAAQQQMEGLLAPHRPKEPAWFLATVGVSPDHQGKGLGSAVVLPGVEAAERAGVPAFLETSAPRNLPFYERLGFTVTADVEVPEGPRTWCMTRKPGA

SEQ ID NO: 2777 - protein, 913 aa, Artificial Sequence
  Synthetic Polypeptide
MALPVTALLLPLALLLHAARPDIQMTQSPSSLSASVGDRVTITCKASQDVGIAVAWYQQKPGKVPKLLIYWASTRHTGVPDRFSGSGSGTDFTLTISSLQPEDVATYYCQQYSSYPYTFGQGTKVEIKGGGGSGGGGSGGGGSEVQLVESGGGLVQPGGSLRLSCAASGFDFSRYWMSWVRQAPGKGLEWIGEINPDSSTINYAPSLKDKFIISRDNAKNSLYLQMNSLRAEDTAVYYCARPDGNYWYFDVWGQGTLVTVSSTREQKLISEEDLAKPTTTPAPRPPTPAPTIASQPLSLRPEACRPAAGGAVHTRGLDFACDIYIWAPLAGTCGVLLLSLVITLYCGRARVKFSRSADAPAYQQGQNQLYNELNLGRREEYDVLDKRRGRDPEMGGKPRRKNPQEGLYNELQKDKMAEAYSEIGMKGERRRGKGHDGLYQGLSTATKDTYDALHMQALPPRSRGSGATNFSLLKQAGDVEENPGPGIHMATYEVLCEVARKLGTDDREVVLFLLNVFIPQPTLAQLIGALRALKEEGRLTFPLLAECLFRAGRRDLLRDLLHLDPRFLERHLAGTMSYFSPYQLTVLHVDGELCARDIRSLIFLSKDTIGSRSTPQTFLHWVYCMENLDLLGPTDVDALMSMLRSLSRVDLQRQVQTLMGLHLSGPSHSQHYRHTPLETDFYDYKDDDDKTSGSGEGRGSLLTCGDVEENPGPHMTEYKPTVRLATRDDVPRAVRTLAAAFADYPATRHTVDPDRHIERVTELQELFLTRVGLDIGKVWVADDGAAVAVWTTPESVEAGAVFAEIGPRMAELSGSRLAAQQQMEGLLAPHRPKEPAWFLATVGVSPDHQGKGLGSAVVLPGVEAAERAGVPAFLETSAPRNLPFYERLGFTVTADVEVPEGPRTWCMTRKPGA

SEQ ID NO: 2778 - protein, 914 aa, Artificial Sequence
  Synthetic Polypeptide
MALPVTALLLPLALLLHAARPDIVMTQSQKSMSTSVGDRVSITCKASQDVITGVAWYQQKPGQSPKLLIYSASYRYTGVPDRFTGSGSGTDFTFTISNVQAEDLAVYYCQQHYSTPLTFGAGTKLELKGGGGSGGGGSGGGGSQVQLQQPGAELVRPGASVKLSCKASGYSFTTYWMNWVKQRPGQGLEWIGMIHPSDSETRLNQKFKDKATLTVDKSSSTAYMQLSSPTSEDSAVYYCARSTMIATRAMDYWGQGTSVTVSSTREQKLISEEDLAKPTTTPAPRPPTPAPTIASQPLSLRPEACRPAAGGAVHTRGLDFACDIYIWAPLAGTCGVLLLSLVITLYCGRARVKFSRSADAPAYQQGQNQLYNELNLGRREEYDVLDKRRGRDPEMGGKPRRKNPQEGLYNELQKDKMAEAYSEIGMKGERRRGKGHDGLYQGLSTATKDTYDALHMQALPPRSRGSGATNFSLLKQAGDVEENPGPGIHMATYEVLCEVARKLGTDDREVVLFLLNVFIPQPTLAQLIGALRALKEEGRLTFPLLAECLFRAGRRDLLRDLLHLDPRFLERHLAGTMSYFSPYQLTVLHVDGELCARDIRSLIFLSKDTIGSRSTPQTFLHWVYCMENLDLLGPTDVDALMSMLRSLSRVDLQRQVQTLMGLHLSGPSHSQHYRHTPLETDFYDYKDDDDKTSGSGEGRGSLLTCGDVEENPGPHMTEYKPTVRLATRDDVPRAVRTLAAAFADYPATRHTVDPDRHIERVTELQELFLTRVGLDIGKVWVADDGAAVAVWTTPESVEAGAVFAEIGPRMAELSGSRLAAQQQMEGLLAPHRPKEPAWFLATVGVSPDHQGKGLGSAVVLPGVEAAERAGVPAFLETSAPRNLPFYERLGFTVTADVEVPEGPRTWCMTRKPGA

SEQ ID NO: 2779 - protein, 916 aa, Artificial Sequence
  Synthetic Polypeptide
MALPVTALLLPLALLLHAARPDIQMTQSPSSLSASVGDRVTITCKASQDVSTAVAWYQQKPGKAPKLLIYSASYRYTGVPDRFTGSGSGTDFTLTISSLQPEDFATYYCQQHYSTPPYTFGGGTKVEIKRGGGGSGGGGSGGGGSQVQLVQSGAEVKKPGASVKVSCKASGYAFSSSWMNWVRQAPGQGLEWIGRIYPGDGDTKYNGKFKGKATLTADKSTSTAYMELSSLRSEDTAVYYCARSTMIATGAMDYWGQGTLVTVSSTREQKLISEEDLAKPTTTPAPRPPTPAPTIASQPLSLRPEACRPAAGGAVHTRGLDFACDIYIWAPLAGTCGVLLLSLVITLYCGRARVKFSRSADAPAYQQGQNQLYNELNLGRREEYDVLDKRRGRDPEMGGKPRRKNPQEGLYNELQKDKMAEAYSEIGMKGERRRGKGHDGLYQGLSTATKDTYDALHMQALPPRSRGSGATNFSLLKQAGDVEENPGPGIHMATYEVLCEVARKLGTDDREVVLFLLNVFIPQPTLAQLIGALRALKEEGRLTFPLLAECLFRAGRRDLLRDLLHLDPRFLERHLAGTMSYFSPYQLTVLHVDGELCARDIRSLIFLSKDTIGSRSTPQTFLHWVYCMENLDLLGPTDVDALMSMLRSLSRVDLQRQVQTLMGLHLSGPSHSQHYRHTPLETDFYDYKDDDDKTSGSGEGRGSLLTCGDVEENPGPHMTEYKPTVRLATRDDVPRAVRTLAAAFADYPATRHTVDPDRHIERVTELQELFLTRVGLDIGKVWVADDGAAVAVWTTPESVEAGAVFAEIGPRMAELSGSRLAAQQQMEGLLAPHRPKEPAWFLATVGVSPDHQGKGLGSAVVLPGVEAAERAGVPAFLETSAPRNLPFYERLGFTVTADVEVPEGPRTWCMTRKPGA

SEQ ID NO: 2780 - protein, 917 aa, Artificial Sequence
  Synthetic Polypeptide
MALPVTALLLPLALLLHAARPDVVMTQTPLSLSVTPGQPASISCRSSQSLVHNNGNTYLHWYLQKPGQSPQLLIYKVSNRFSGVPDRFSGSGSGTDFTLKISRVEAEDVGVYFCSQSTHVPPYTFGGGTKVEIKGGGGSGGGGSGGGGSEVQLVESGGGLVQPGGSLRLSCAASGFTFSDYYMAWVRQAPGKGLEWVAEINYDGSSTYYVDSVKGRFTISRDNAKNSLYLQMNSLRAEDTAVYYCARDRGFYFDYWGQGTTVTVSSTREQKLISEEDLAKPTTTPAPRPPTPAPTIASQPLSLRPEACRPAAGGAVHTRGLDFACDIYIWAPLAGTCGVLLLSLVITLYCGRARVKFSRSADAPAYQQGQNQLYNELNLGRREEYDVLDKRRGRDPEMGGKPRRKNPQEGLYNELQKDKMAEAYSEIGMKGERRRGKGHDGLYQGLSTATKDTYDALHMQALPPRSRGSGATNFSLLKQAGDVEENPGPGIHMATYEVLCEVARKLGTDDREVVLFLLNVFIPQPTLAQLIGALRALKEEGRLTFPLLAECLFRAGRRDLLRDLLHLDPRFLERHLAGTMSYFSPYQLTVLHVDGELCARDIRSLIFLSKDTIGSRSTPQTFLHWVYCMENLDLLGPTDVDALMSMLRSLSRVDLQRQVQTLMGLHLSGPSHSQHYRHTPLETDFYDYKDDDDKTSGSGEGRGSLLTCGDVEENPGPHMTEYKPTVRLATRDDVPRAVRTLAAAFADYPATRHTVDPDRHIERVTELQELFLTRVGLDIGKVWVADDGAAVAVWTTPESVEAGAVFAEIGPRMAELSGSRLAAQQQMEGLLAPHRPKEPAWFLATVGVSPDHQGKGLGSAVVLPGVEAAERAGVPAFLETSAPRNLPFYERLGFTVTADVEVPEGPRTWCMTRKPGA

SEQ ID NO: 2781 - protein, 917 aa, Artificial Sequence
  Synthetic Polypeptide
MALPVTALLLPLALLLHAARPDVVMTQTPLSLSVTPGQPASISCRSSQSLVHSNGLTYLHWYLQKPGQSPQLLIYKVSNRFSGVPDRFSGSGSGTDFTLKISRVEAEDVGVYFCSQSTHVPPFTFGGGTKVEIKGGGGSGGGGSGGGGSEVQLVESGGGLVQPGGSLRLSCAASGFTFSDYYMAWVRQAPGKGLEWVASINYDGESTYYVDSVKGRFTISRDNAKNSLYLQMNSLRAEDTAVYYCARDRGYYFDYWGQGTTVTVSSTREQKLISEEDLAKPTTTPAPRPPTPAPTIASQPLSLRPEACRPAAGGAVHTRGLDFACDIYIWAPLAGTCGVLLLSLVITLYCGRARVKFSRSADAPAYQQGQNQLYNELNLGRREEYDVLDKRRGRDPEMGGKPRRKNPQEGLYNELQKDKMAEAYSEIGMKGERRRGKGHDGLYQGLSTATKDTYDALHMQALPPRSRGSGATNFSLLKQAGDVEENPGPGIHMATYEVLCEVARKLGTDDREVVLFLLNVFIPQPTLAQLIGALRALKEEGRLTFPLLAECLFRAGRRDLLRDLLHLDPRFLERHLAGTMSYFSPYQLTVLHVDGELCARDIRSLIFLSKDTIGSRSTPQTFLHWVYCMENLDLLGPTDVDALMSMLRSLSRVDLQRQVQTLMGLHLSGPSHSQHYRHTPLETDFYDYKDDDDKTSGSGEGRGSLLTCGDVEENPGPHMTEYKPTVRLATRDDVPRAVRTLAAAFADYPATRHTVDPDRHIERVTELQELFLTRVGLDIGKVWVADDGAAVAVWTTPESVEAGAVFAEIGPRMAELSGSRLAAQQQMEGLLAPHRPKEPAWFLATVGVSPDHQGKGLGSAVVLPGVEAAERAGVPAFLETSAPRNLPFYERLGFTVTADVEVPEGPRTWCMTRKPGA

SEQ ID NO: 2782 - protein, 917 aa, Artificial Sequence
  Synthetic Polypeptide
MALPVTALLLPLALLLHAARPDVVMTQSPLSLPVTPGEPASISCRSSQSLVHSNGNTYLHWYLQKPGQSPQLLIYKVSNRFSGVPDRFSGSGSGTDFTLKISRVEAEDVGVYFCSQSTHVPPFTFGGGTKVEIKGGGGSGGGGSGGGGSEVQLVESGGGLVQPGGSLRLSCAASGFTFSDYYMAWVRQAPGKGLEWVADINYDGGSTYYLDSLKSRFTISRDNAKNSLYLQMNSLRAEDTAVYYCARDRGYYFDYWGQGTLVTVSSTREQKLISEEDLAKPTTTPAPRPPTPAPTIASQPLSLRPEACRPAAGGAVHTRGLDFACDIYIWAPLAGTCGVLLLSLVITLYCGRARVKFSRSADAPAYQQGQNQLYNELNLGRREEYDVLDKRRGRDPEMGGKPRRKNPQEGLYNELQKDKMAEAYSEIGMKGERRRGKGHDGLYQGLSTATKDTYDALHMQALPPRSRGSGATNFSLLKQAGDVEENPGPGIHMATYEVLCEVARKLGTDDREVVLFLLNVFIPQPTLAQLIGALRALKEEGRLTFPLLAECLFRAGRRDLLRDLLHLDPRFLERHLAGTMSYFSPYQLTVLHVDGELCARDIRSLIFLSKDTIGSRSTPQTFLHWVYCMENLDLLGPTDVDALMSMLRSLSRVDLQRQVQTLMGLHLSGPSHSQHYRHTPLETDFYDYKDDDDKTSGSGEGRGSLLTCGDVEENPGPHMTEYKPTVRLATRDDVPRAVRTLAAAFADYPATRHTVDPDRHIERVTELQELFLTRVGLDIGKVWVADDGAAVAVWTTPESVEAGAVFAEIGPRMAELSGSRLAAQQQMEGLLAPHRPKEPAWFLATVGVSPDHQGKGLGSAVVLPGVEAAERAGVPAFLETSAPRNLPFYERLGFTVTADVEVPEGPRTWCMTRKPGA

SEQ ID NO: 2783 - protein, 915 aa, Artificial Sequence
  Synthetic Polypeptide
MALPVTALLLPLALLLHAARPDIQMTQSSSYLSVSLGGRVTITCKASDHINNWLAWYQQKPGNAPRLLISGATSLETGVPSRFSGSGSGKDYTLSITSLQTEDVATYYCQQYWSTPWTFGGGTKLEIKGGGGSGGGGSGGGGSQVQLQQSGAELARPGASVKLSCKASGYTFTSYWMQWVKQRPGQGLEWIGAIYPGDGDTRYTQKFKGKATLTADKSSSTAYMQLSSLASEDSAVYYCARGKVYYGSNPFAYWGQGTLVTVSATREQKLISEEDLAKPTTTPAPRPPTPAPTIASQPLSLRPEACRPAAGGAVHTRGLDFACDIYIWAPLAGTCGVLLLSLVITLYCGRARVKFSRSADAPAYQQGQNQLYNELNLGRREEYDVLDKRRGRDPEMGGKPRRKNPQEGLYNELQKDKMAEAYSEIGMKGERRRGKGHDGLYQGLSTATKDTYDALHMQALPPRSRGSGATNFSLLKQAGDVEENPGPGIHMATYEVLCEVARKLGTDDREVVLFLLNVFIPQPTLAQLIGALRALKEEGRLTFPLLAECLFRAGRRDLLRDLLHLDPRFLERHLAGTMSYFSPYQLTVLHVDGELCARDIRSLIFLSKDTIGSRSTPQTFLHWVYCMENLDLLGPTDVDALMSMLRSLSRVDLQRQVQTLMGLHLSGPSHSQHYRHTPLETDFYDYKDDDDKTSGSGEGRGSLLTCGDVEENPGPHMTEYKPTVRLATRDDVPRAVRTLAAAFADYPATRHTVDPDRHIERVTELQELFLTRVGLDIGKVWVADDGAAVAVWTTPESVEAGAVFAEIGPRMAELSGSRLAAQQQMEGLLAPHRPKEPAWFLATVGVSPDHQGKGLGSAVVLPGVEAAERAGVPAFLETSAPRNLPFYERLGFTVTADVEVPEGPRTWCMTRKPGA

SEQ ID NO: 2784 - protein, 915 aa, Artificial Sequence
  Synthetic Polypeptide
MALPVTALLLPLALLLHAARPDIVMTQSHKFMSTSVGDRVSITCKASQDVSTAVAWYQQKPGQSPKLLIYSASYRYTGVPDRFTGSGSGTDFTFTISSVQAEDLAVYYCQQHYSTPPYTFGGGTKLEIKGGGGSGGGGSGGGGSQVQLQQSGPELVKPGASVKISCKASGYAFSSSWMNWVKQRPGQGLEWIGRIYPGDGDTKYNGKFKGKATLTADKSSSTAYMQLSSLTSVDSAVYFCARSTMIATGAMDYWGQGTSVTVSSTREQKLISEEDLAKPTTTPAPRPPTPAPTIASQPLSLRPEACRPAAGGAVHTRGLDFACDIYIWAPLAGTCGVLLLSLVITLYCGRARVKFSRSADAPAYQQGQNQLYNELNLGRREEYDVLDKRRGRDPEMGGKPRRKNPQEGLYNELQKDKMAEAYSEIGMKGERRRGKGHDGLYQGLSTATKDTYDALHMQALPPRSRGSGATNFSLLKQAGDVEENPGPGIHMATYEVLCEVARKLGTDDREVVLFLLNVFIPQPTLAQLIGALRALKEEGRLTFPLLAECLFRAGRRDLLRDLLHLDPRFLERHLAGTMSYFSPYQLTVLHVDGELCARDIRSLIFLSKDTIGSRSTPQTFLHWVYCMENLDLLGPTDVDALMSMLRSLSRVDLQRQVQTLMGLHLSGPSHSQHYRHTPLETDFYDYKDDDDKTSGSGEGRGSLLTCGDVEENPGPHMTEYKPTVRLATRDDVPRAVRTLAAAFADYPATRHTVDPDRHIERVTELQELFLTRVGLDIGKVWVADDGAAVAVWTTPESVEAGAVFAEIGPRMAELSGSRLAAQQQMEGLLAPHRPKEPAWFLATVGVSPDHQGKGLGSAVVLPGVEAAERAGVPAFLETSAPRNLPFYERLGFTVTADVEVPEGPRTWCMTRKPGA

SEQ ID NO: 2785 - protein, 920 aa, Artificial Sequence
  Synthetic Polypeptide
MALPVTALLLPLALLLHAARPQSVLTQPPSVSGAPGQRVTISCTGSGSNIGAPYDVSWYQQLPGTAPKLLIYHNNKRPSGVPDRFSGSKSGTSASLAITGLQAEDEADYYCATVEAGLSGSVFGGGTKLTVLGAGGGGSGGGGSGGGGSQVQLVQSGAEVKKPGASVKVSCKVSGYTLTELSIHWVRQAPGKGLEWMGGFDPEENEIVYAQRFQGRVTMTEDTSTDTAYMELSSLRSEDTAVYYCAIVGSFSPLTLGLWGQGTMVTVSSTREQKLISEEDLAKPTTTPAPRPPTPAPTIASQPLSLRPEACRPAAGGAVHTRGLDFACDIYIWAPLAGTCGVLLLSLVITLYCGRARVKFSRSADAPAYQQGQNQLYNELNLGRREEYDVLDKRRGRDPEMGGKPRRKNPQEGLYNELQKDKMAEAYSEIGMKGERRRGKGHDGLYQGLSTATKDTYDALHMQALPPRSRGSGATNFSLLKQAGDVEENPGPGIHMATYEVLCEVARKLGTDDREVVLFLLNVFIPQPTLAQLIGALRALKEEGRLTFPLLAECLFRAGRRDLLRDLLHLDPRFLERHLAGTMSYFSPYQLTVLHVDGELCARDIRSLIFLSKDTIGSRSTPQTFLHWVYCMENLDLLGPTDVDALMSMLRSLSRVDLQRQVQTLMGLHLSGPSHSQHYRHTPLETDFYDYKDDDDKTSGSGEGRGSLLTCGDVEENPGPHMTEYKPTVRLATRDDVPRAVRTLAAAFADYPATRHTVDPDRHIERVTELQELFLTRVGLDIGKVWVADDGAAVAVWTTPESVEAGAVFAEIGPRMAELSGSRLAAQQQMEGLLAPHRPKEPAWFLATVGVSPDHQGKGLGSAVVLPGVEAAERAGVPAFLETSAPRNLPFYERLGFTVTADVEVPEGPRTWCMTRKPGA

SEQ ID NO: 2786 - protein, 920 aa, Artificial Sequence
  Synthetic Polypeptide
MALPVTALLLPLALLLHAARPQSVLTQPPSVSGAPGQRVTISCTGSGSNIGAPYDVSWYQQLPGTAPKLLIYHNNKRPSGVPDRFSGSKSGTSASLAITGLQAEDEADYYCQSYDSSSISTIFGGGTKLTVLGAGGGGSGGGGSGGGGSQVQLVQSGAEVKKPGASVKVSCKVSGYTLTELSIHWVRQAPGKGLEWMGGFDPEENEIVYAQRFQGRVTMTEDTSTDTAYMELSSLRSEDTAVYYCAIVGSFSGIAYRPWGQGTMVTVSSTREQKLISEEDLAKPTTTPAPRPPTPAPTIASQPLSLRPEACRPAAGGAVHTRGLDFACDIYIWAPLAGTCGVLLLSLVITLYCGRARVKFSRSADAPAYQQGQNQLYNELNLGRREEYDVLDKRRGRDPEMGGKPRRKNPQEGLYNELQKDKMAEAYSEIGMKGERRRGKGHDGLYQGLSTATKDTYDALHMQALPPRSRGSGATNFSLLKQAGDVEENPGPGIHMATYEVLCEVARKLGTDDREVVLFLLNVFIPQPTLAQLIGALRALKEEGRLTFPLLAECLFRAGRRDLLRDLLHLDPRFLERHLAGTMSYFSPYQLTVLHVDGELCARDIRSLIFLSKDTIGSRSTPQTFLHWVYCMENLDLLGPTDVDALMSMLRSLSRVDLQRQVQTLMGLHLSGPSHSQHYRHTPLETDFYDYKDDDDKTSGSGEGRGSLLTCGDVEENPGPHMTEYKPTVRLATRDDVPRAVRTLAAAFADYPATRHTVDPDRHIERVTELQELFLTRVGLDIGKVWVADDGAAVAVWTTPESVEAGAVFAEIGPRMAELSGSRLAAQQQMEGLLAPHRPKEPAWFLATVGVSPDHQGKGLGSAVVLPGVEAAERAGVPAFLETSAPRNLPFYERLGFTVTADVEVPEGPRTWCMTRKPGA

SEQ ID NO: 2787 - protein, 931 aa, Artificial Sequence
  Synthetic Polypeptide
MALPVTALLLPLALLLHAARPDEFEVQLVESGGGLVQAGGSLRLSCVASGISSSKRNMGWYRQAPGKQRESVATISSGGNKDYTDAVKDRFTISRDTTKNTVYLQMNSLKPEDTAVYYCKIEAGTGWATRRGYTYWGQGTLVTVSSLEGGGGSGGGGSGGGGSFEVQLVESGGGLVQAGGSLRLSCAASGSIFSGNVMGWYRRQAPGKEREWVAAIASGGSIYYRDSVKGRFTISRDNAKNTVYLQMNSLKPEDTAVYYCNSHPPTLPYWGLGTQVTVSSTREQKLISEEDLAKPTTTPAPRPPTPAPTIASQPLSLRPEACRPAAGGAVHTRGLDFACDIYIWAPLAGTCGVLLLSLVITLYCGRARVKFSRSADAPAYQQGQNQLYNELNLGRREEYDVLDKRRGRDPEMGGKPRRKNPQEGLYNELQKDKMAEAYSEIGMKGERRRGKGHDGLYQGLSTATKDTYDALHMQALPPRSRGSGATNFSLLKQAGDVEENPGPGIHMATYEVLCEVARKLGTDDREVVLFLLNVFIPQPTLAQLIGALRALKEEGRLTFPLLAECLFRAGRRDLLRDLLHLDPRFLERHLAGTMSYFSPYQLTVLHVDGELCARDIRSLIFLSKDTIGSRSTPQTFLHWVYCMENLDLLGPTDVDALMSMLRSLSRVDLQRQVQTLMGLHLSGPSHSQHYRHTPLETDFYDYKDDDDKTSGSGEGRGSLLTCGDVEENPGPHMTEYKPTVRLATRDDVPRAVRTLAAAFADYPATRHTVDPDRHIERVTELQELFLTRVGLDIGKVWVADDGAAVAVWTTPESVEAGAVFAEIGPRMAELSGSRLAAQQQMEGLLAPHRPKEPAWFLATVGVSPDHQGKGLGSAVVLPGVEAAERAGVPAFLETSAPRNLPFYERLGFTVTADVEVPEGPRTWCMTRKPGA

SEQ ID NO: 2788 - protein, 965 aa, Artificial Sequence
  Synthetic Polypeptide
MALPVTALLLPLALLLHAARPDEFEVQLVESGGGLVQAGDSLRLSCAASGRAFSRYAMGWFRQAPGKEREFVAAIGWGPSKTNYADSVKGRFTISRDNAKNTVYLQMNTLKPEDTAVYSCAAKFVNTDSTWSRSEMYTYWGQGTLVTVSSLEGGGGSGGGGSGGGGSGSGGSGSGGSGSGGSGSGGSFEVQLVESGGGSVQAGGSLRLSCTTSGRALNMYVMGWFRQAPGNEREFVAATSSSGGSTSYPDSVKGRFTISRDNAKNTVYLQMNSLKPEDTAAYRCAASPYVSTPTMNILEEYRYWGLGTQVTVSSTREQKLISEEDLAKPTTTPAPRPPTPAPTIASQPLSLRPEACRPAAGGAVHTRGLDFACDIYIWAPLAGTCGVLLLSLVITLYCGRARVKFSRSADAPAYQQGQNQLYNELNLGRREEYDVLDKRRGRDPEMGGKPRRKNPQEGLYNELQKDKMAEAYSEIGMKGERRRGKGHDGLYQGLSTATKDTYDALHMQALPPRSRGSGATNFSLLKQAGDVEENPGPGIHMATYEVLCEVARKLGTDDREVVLFLLNVFIPQPTLAQLIGALRALKEEGRLTFPLLAECLFRAGRRDLLRDLLHLDPRFLERHLAGTMSYFSPYQLTVLHVDGELCARDIRSLIFLSKDTIGSRSTPQTFLHWVYCMENLDLLGPTDVDALMSMLRSLSRVDLQRQVQTLMGLHLSGPSHSQHYRHTPLETDFYDYKDDDDKTSGSGEGRGSLLTCGDVEENPGPHMTEYKPTVRLATRDDVPRAVRTLAAAFADYPATRHTVDPDRHIERVTELQELFLTRVGLDIGKVWVADDGAAVAVWTTPESVEAGAVFAEIGPRMAELSGSRLAAQQQMEGLLAPHRPKEPAWFLATVGVSPDHQGKGLGSAVVLPGVEAAERAGVPAFLETSAPRNLPFYERLGFTVTADVEVPEGPRTWCMTRKPGA

SEQ ID NO: 2789 - protein, 918 aa, Artificial Sequence
  Synthetic Polypeptide
MALPVTALLLPLALLLHAARPDIQMTQSPSSLSASVGDRVTITCSASSSVSYMYWYQQKPGKAPKLLIYLTSNLASGVPSRFSGSGSGTDFTLTISSLQPEDFATYYCQQWRSNPFTFGQGTKLEIKRGGGGSGGGGSGGGGSQITLKESGPTLVKPTQTLTLTCTFSGFSLSTSGMGVGWIRQPPGKALEWLAHIWWDDVKRYSPSLKSRLTITKDTSKNQVVLTMTNMDPVDTATYYCARIVSFDNDVVSAMDYWGQGTLVTVSSTREQKLISEEDLAKPTTTPAPRPPTPAPTIASQPLSLRPEACRPAAGGAVHTRGLDFACDIYIWAPLAGTCGVLLLSLVITLYCGRARVKFSRSADAPAYQQGQNQLYNELNLGRREEYDVLDKRRGRDPEMGGKPRRKNPQEGLYNELQKDKMAEAYSEIGMKGERRRGKGHDGLYQGLSTATKDTYDALHMQALPPRSRGSGATNFSLLKQAGDVEENPGPGIHMATYEVLCEVARKLGTDDREVVLFLLNVFIPQPTLAQLIGALRALKEEGRLTFPLLAECLFRAGRRDLLRDLLHLDPRFLERHLAGTMSYFSPYQLTVLHVDGELCARDIRSLIFLSKDTIGSRSTPQTFLHWVYCMENLDLLGPTDVDALMSMLRSLSRVDLQRQVQTLMGLHLSGPSHSQHYRHTPLETDFYDYKDDDDKTSGSGEGRGSLLTCGDVEENPGPHMTEYKPTVRLATRDDVPRAVRTLAAAFADYPATRHTVDPDRHIERVTELQELFLTRVGLDIGKVWVADDGAAVAVWTTPESVEAGAVFAEIGPRMAELSGSRLAAQQQMEGLLAPHRPKEPAWFLATVGVSPDHQGKGLGSAVVLPGVEAAERAGVPAFLETSAPRNLPFYERLGFTVTADVEVPEGPRTWCMTRKPGA

SEQ ID NO: 2790 - protein, 913 aa, Artificial Sequence
  Synthetic Polypeptide
MALPVTALLLPLALLLHAARPEIVMTQSPATLSVSPGERATLSCKASQSVSNDVVWYQQKPGQAPRLLIYYASNRYTGIPARFSGSGSGTEFTLTISSLQSEDFAVYYCQQDYTSPWTFGQGTKLEIKRGGGGSGGGGSGGGGSQVQLVQSGAEVKKPGASVKVSCKASGYTFTNYGMNWVRQAPGQGLEWMGWINTYTGEPTYADDFKGRVTMTTDTSTSTAYMELRSLRSDDTAVYYCARIGDSSPSDYWGQGTLVTVSSTREQKLISEEDLAKPTTTPAPRPPTPAPTIASQPLSLRPEACRPAAGGAVHTRGLDFACDIYIWAPLAGTCGVLLLSLVITLYCGRARVKFSRSADAPAYQQGQNQLYNELNLGRREEYDVLDKRRGRDPEMGGKPRRKNPQEGLYNELQKDKMAEAYSEIGMKGERRRGKGHDGLYQGLSTATKDTYDALHMQALPPRSRGSGATNFSLLKQAGDVEENPGPGIHMATYEVLCEVARKLGTDDREVVLFLLNVFIPQPTLAQLIGALRALKEEGRLTFPLLAECLFRAGRRDLLRDLLHLDPRFLERHLAGTMSYFSPYQLTVLHVDGELCARDIRSLIFLSKDTIGSRSTPQTFLHWVYCMENLDLLGPTDVDALMSMLRSLSRVDLQRQVQTLMGLHLSGPSHSQHYRHTPLETDFYDYKDDDDKTSGSGEGRGSLLTCGDVEENPGPHMTEYKPTVRLATRDDVPRAVRTLAAAFADYPATRHTVDPDRHIERVTELQELFLTRVGLDIGKVWVADDGAAVAVWTTPESVEAGAVFAEIGPRMAELSGSRLAAQQQMEGLLAPHRPKEPAWFLATVGVSPDHQGKGLGSAVVLPGVEAAERAGVPAFLETSAPRNLPFYERLGFTVTADVEVPEGPRTWCMTRKPGA

SEQ ID NO: 2791 - protein, 914 aa, Artificial Sequence
  Synthetic Polypeptide
MALPVTALLLPLALLLHAARPDSTDIQMTQSPSSLSASVGDRVTITCRASQSISSYLNWYQQKPGKAPKLLIYLASNLQSGVPSRFSGSGSGTDFTLTISSLQPEDFATYYCQQAEYMPLTFGQGTKVEIKRAGGGGSGGGGSGGGGSEVQLLESGGGLVQPGGSLRLSCAASGFTFSGYAMSWVRQAPGKGLEWVSEIAPPGLNTRYADSVKGRFTISRDNSKNTLYLQMNSLRAEDTAVYYCAKSDTAFDYWGQGTLVTVSTREQKLISEEDLAKPTTTPAPRPPTPAPTIASQPLSLRPEACRPAAGGAVHTRGLDFACDIYIWAPLAGTCGVLLLSLVITLYCGRARVKFSRSADAPAYQQGQNQLYNELNLGRREEYDVLDKRRGRDPEMGGKPRRKNPQEGLYNELQKDKMAEAYSEIGMKGERRRGKGHDGLYQGLSTATKDTYDALHMQALPPRSRGSGATNFSLLKQAGDVEENPGPGIHMATYEVLCEVARKLGTDDREVVLFLLNVFIPQPTLAQLIGALRALKEEGRLTFPLLAECLFRAGRRDLLRDLLHLDPRFLERHLAGTMSYFSPYQLTVLHVDGELCARDIRSLIFLSKDTIGSRSTPQTFLHWVYCMENLDLLGPTDVDALMSMLRSLSRVDLQRQVQTLMGLHLSGPSHSQHYRHTPLETDFYDYKDDDDKTSGSGEGRGSLLTCGDVEENPGPHMTEYKPTVRLATRDDVPRAVRTLAAAFADYPATRHTVDPDRHIERVTELQELFLTRVGLDIGKVWVADDGAAVAVWTTPESVEAGAVFAEIGPRMAELSGSRLAAQQQMEGLLAPHRPKEPAWFLATVGVSPDHQGKGLGSAVVLPGVEAAERAGVPAFLETSAPRNLPFYERLGFTVTADVEVPEGPRTWCMTRKPGA

SEQ ID NO: 2792 - protein, 917 aa, Artificial Sequence
  Synthetic Polypeptide
MALPVTALLLPLALLLHAARPDQAVLTQESALTTSPGETVTLTCRSSTGAVTTSNYANWVQEKPDHLFTGLIGGTNNRVPGVPARFSGSLIGDKAALTITGAQTEDEAIYFCVLWHSNHWVFGGGTKLTVLGGGGSGGGGSGGGGSDVQLVESGGGLVQPGGSRKLSCAASGFTFSSFGMHWVRQAPEKGLEWVAYISSGSSTLHYADTVKGRFTISRDNPKNTLFLQMTSLRSEDTAMYYCARWGNYPHYAMDYWGQGTSVTVSSTREQKLISEEDLAKPTTTPAPRPPTPAPTIASQPLSLRPEACRPAAGGAVHTRGLDFACDIYIWAPLAGTCGVLLLSLVITLYCGRARVKFSRSADAPAYQQGQNQLYNELNLGRREEYDVLDKRRGRDPEMGGKPRRKNPQEGLYNELQKDKMAEAYSEIGMKGERRRGKGHDGLYQGLSTATKDTYDALHMQALPPRSRGSGATNFSLLKQAGDVEENPGPGIHMATYEVLCEVARKLGTDDREVVLFLLNVFIPQPTLAQLIGALRALKEEGRLTFPLLAECLFRAGRRDLLRDLLHLDPRFLERHLAGTMSYFSPYQLTVLHVDGELCARDIRSLIFLSKDTIGSRSTPQTFLHWVYCMENLDLLGPTDVDALMSMLRSLSRVDLQRQVQTLMGLHLSGPSHSQHYRHTPLETDFYDYKDDDDKTSGSGEGRGSLLTCGDVEENPGPHMTEYKPTVRLATRDDVPRAVRTLAAAFADYPATRHTVDPDRHIERVTELQELFLTRVGLDIGKVWVADDGAAVAVWTTPESVEAGAVFAEIGPRMAELSGSRLAAQQQMEGLLAPHRPKEPAWFLATVGVSPDHQGKGLGSAVVLPGVEAAERAGVPAFLETSAPRNLPFYERLGFTVTADVEVPEGPRTWCMTRKPGA

SEQ ID NO: 2793 - protein, 799 aa, Artificial Sequence
  Synthetic Polypeptide
MALPVTALLLPLALLLHAARPDEFEVQLVESGGGSVQTGGSLRLTCAASGRTSRSYGMGWFRQAPGKEREFVSGISWRGDSTGYADSVKGRFTISRDNAKNTVDLQMNSLKPEDTAIYYCAAAAGSAWYGTLYEYDYWGQGTLVTVSSTREQKLISEEDLAKPTTTPAPRPPTPAPTIASQPLSLRPEACRPAAGGAVHTRGLDFACDIYIWAPLAGTCGVLLLSLVITLYCGRARVKFSRSADAPAYQQGQNQLYNELNLGRREEYDVLDKRRGRDPEMGGKPRRKNPQEGLYNELQKDKMAEAYSEIGMKGERRRGKGHDGLYQGLSTATKDTYDALHMQALPPRSRGSGATNFSLLKQAGDVEENPGPGIHMATYEVLCEVARKLGTDDREVVLFLLNVFIPQPTLAQLIGALRALKEEGRLTFPLLAECLFRAGRRDLLRDLLHLDPRFLERHLAGTMSYFSPYQLTVLHVDGELCARDIRSLIFLSKDTIGSRSTPQTFLHWVYCMENLDLLGPTDVDALMSMLRSLSRVDLQRQVQTLMGLHLSGPSHSQHYRHTPLETDFYDYKDDDDKTSGSGEGRGSLLTCGDVEENPGPHMTEYKPTVRLATRDDVPRAVRTLAAAFADYPATRHTVDPDRHIERVTELQELFLTRVGLDIGKVWVADDGAAVAVWTTPESVEAGAVFAEIGPRMAELSGSRLAAQQQMEGLLAPHRPKEPAWFLATVGVSPDHQGKGLGSAVVLPGVEAAERAGVPAFLETSAPRNLPFYERLGFTVTADVEVPEGPRTWCMTRKPGA

SEQ ID NO: 2794 - protein, 941 aa, Artificial Sequence
  Synthetic Polypeptide
MALPVTALLLPLALLLHAARPDEFEVQLVESGGGSVQTGGSLRLTCAASGRTSRSYGMGWFRQAPGKEREFVSGISWRGDSTGYADSVKGRFTISRDNAKNTVDLQMNSLKPEDTAIYYCAAAAGSAWYGTLYEYDYWGQGTLVTVSSLEGGGGSGGGGSGGGGSFEEVQLVESGGGSVQAGGSLRLSCAASGDTYGSYWMGWFRQAPGKEREGVAAINRGGGYTVYADSVKGRFTISRDTAKNTVYLQMNSLRPDDTADYYCAASGVLGGLHEDWFNYWGQGTLVTVSSTREQKLISEEDLAKPTTTPAPRPPTPAPTIASQPLSLRPEACRPAAGGAVHTRGLDFACDIYIWAPLAGTCGVLLLSLVITLYCGRARVKFSRSADAPAYQQGQNQLYNELNLGRREEYDVLDKRRGRDPEMGGKPRRKNPQEGLYNELQKDKMAEAYSEIGMKGERRRGKGHDGLYQGLSTATKDTYDALHMQALPPRSRGSGATNFSLLKQAGDVEENPGPGIHMATYEVLCEVARKLGTDDREVVLFLLNVFIPQPTLAQLIGALRALKEEGRLTFPLLAECLFRAGRRDLLRDLLHLDPRFLERHLAGTMSYFSPYQLTVLHVDGELCARDIRSLIFLSKDTIGSRSTPQTFLHWVYCMENLDLLGPTDVDALMSMLRSLSRVDLQRQVQTLMGLHLSGPSHSQHYRHTPLETDFYDYKDDDDKTSGSGEGRGSLLTCGDVEENPGPHMTEYKPTVRLATRDDVPRAVRTLAAAFADYPATRHTVDPDRHIERVTELQELFLTRVGLDIGKVWVADDGAAVAVWTTPESVEAGAVFAEIGPRMAELSGSRLAAQQQMEGLLAPHRPKEPAWFLATVGVSPDHQGKGLGSAVVLPGVEAAERAGVPAFLETSAPRNLPFYERLGFTVTADVEVPEGPRTWCMTRKPGA

SEQ ID NO: 2795 - protein, 960 aa, Artificial Sequence
  Synthetic Polypeptide
MALPVTALLLPLALLLHAARPDEFEVQLVESGGGSVQAGGSLRLTCAASGSTSRSYGMGWFRQAPGKEREFVSGISWRGDSTGYADSVKGRFTISRDNAKNTVDLQMNSLKPEDTAIYYCAAAAGSTWYGTLYEYDYWGQGTLVTVSSLEGGGGSGGGGSGGGGSGSGGSGSGGSGSGGSGSGGSFEVQLVESGGGSVQAGGSLRLSCAASGDTYGSYWMGWFRQAPGQEREAVAAINRGGGYTVYADSVKGRFTISRDNAKNTLYLQMNSLRPDDTADYYCAASGVLGGLHEDWFNYWGQGTLVTVSSTREQKLISEEDLAKPTTTPAPRPPTPAPTIASQPLSLRPEACRPAAGGAVHTRGLDFACDIYIWAPLAGTCGVLLLSLVITLYCGRARVKFSRSADAPAYQQGQNQLYNELNLGRREEYDVLDKRRGRDPEMGGKPRRKNPQEGLYNELQKDKMAEAYSEIGMKGERRRGKGHDGLYQGLSTATKDTYDALHMQALPPRSRGSGATNFSLLKQAGDVEENPGPGIHMATYEVLCEVARKLGTDDREVVLFLLNVFIPQPTLAQLIGALRALKEEGRLTFPLLAECLFRAGRRDLLRDLLHLDPRFLERHLAGTMSYFSPYQLTVLHVDGELCARDIRSLIFLSKDTIGSRSTPQTFLHWVYCMENLDLLGPTDVDALMSMLRSLSRVDLQRQVQTLMGLHLSGPSHSQHYRHTPLETDFYDYKDDDDKTSGSGEGRGSLLTCGDVEENPGPHMTEYKPTVRLATRDDVPRAVRTLAAAFADYPATRHTVDPDRHIERVTELQELFLTRVGLDIGKVWVADDGAAVAVWTTPESVEAGAVFAEIGPRMAELSGSRLAAQQQMEGLLAPHRPKEPAWFLATVGVSPDHQGKGLGSAVVLPGVEAAERAGVPAFLETSAPRNLPFYERLGFTVTADVEVPEGPRTWCMTRKPGA

SEQ ID NO: 2796 - protein, 908 aa, Artificial Sequence
  Synthetic Polypeptide
MALPVTALLLPLALLLHAARPDIQMTQSPSSLSASVGDRVTITCRASQGIRNNLAWYQQKPGKAPKRLIYAASNLQSGVPSRFTGSGSGTEFTLIVSSLQPEDFATYYCLQHHSYPLTSGGGTKVEGGGGSGGGGSGGGGSEVQVLESGGGLVQPGGSLRLSCAASGFTFSSYAMSWVRQAPGKGLEWVSAISGSGGSTNYADSVKGRFTISRDNSKNTLYLQMNSLRAEDTAVYYCAGSSGWSEYWGQGTLVTVSSTREQKLISEEDLAKPTTTPAPRPPTPAPTIASQPLSLRPEACRPAAGGAVHTRGLDFACDIYIWAPLAGTCGVLLLSLVITLYCGRARVKFSRSADAPAYQQGQNQLYNELNLGRREEYDVLDKRRGRDPEMGGKPRRKNPQEGLYNELQKDKMAEAYSEIGMKGERRRGKGHDGLYQGLSTATKDTYDALHMQALPPRSRGSGATNFSLLKQAGDVEENPGPGIHMATYEVLCEVARKLGTDDREVVLFLLNVFIPQPTLAQLIGALRALKEEGRLTFPLLAECLFRAGRRDLLRDLLHLDPRFLERHLAGTMSYFSPYQLTVLHVDGELCARDIRSLIFLSKDTIGSRSTPQTFLHWVYCMENLDLLGPTDVDALMSMLRSLSRVDLQRQVQTLMGLHLSGPSHSQHYRHTPLETDFYDYKDDDDKTSGSGEGRGSLLTCGDVEENPGPHMTEYKPTVRLATRDDVPRAVRTLAAAFADYPATRHTVDPDRHIERVTELQELFLTRVGLDIGKVWVADDGAAVAVWTTPESVEAGAVFAEIGPRMAELSGSRLAAQQQMEGLLAPHRPKEPAWFLATVGVSPDHQGKGLGSAVVLPGVEAAERAGVPAFLETSAPRNLPFYERLGFTVTADVEVPEGPRTWCMTRKPGA

SEQ ID NO: 2797 - protein, 914 aa, Artificial Sequence
  Synthetic Polypeptide
MALPVTALLLPLALLLHAARPDEIQLVQSGAEVKKPGESLRISCKGSGFNIEDYYIHWVRQMPGKGLEWMGRIDPENDETKYGPIFQGHVTISADTSINTVYLQWSSLKASDTAMYYCAFRGGVYWGQGTTVTVSSGGGGSGGGGSGGGGSDVVMTQSPDSLAVSLGERATINCKSSQSLLDSDGKTYLNWLQQKPGQPPKRLISLVSKLDSGVPDRFSGSGSGTDFTLTISSLQAEDVAVYYCWQGTHFPGTFGGGTKVEIKTREQKLISEEDLAKPTTTPAPRPPTPAPTIASQPLSLRPEACRPAAGGAVHTRGLDFACDIYIWAPLAGTCGVLLLSLVITLYCGRARVKFSRSADAPAYQQGQNQLYNELNLGRREEYDVLDKRRGRDPEMGGKPRRKNPQEGLYNELQKDKMAEAYSEIGMKGERRRGKGHDGLYQGLSTATKDTYDALHMQALPPRSRGSGATNFSLLKQAGDVEENPGPGIHMATYEVLCEVARKLGTDDREVVLFLLNVFIPQPTLAQLIGALRALKEEGRLTFPLLAECLFRAGRRDLLRDLLHLDPRFLERHLAGTMSYFSPYQLTVLHVDGELCARDIRSLIFLSKDTIGSRSTPQTFLHWVYCMENLDLLGPTDVDALMSMLRSLSRVDLQRQVQTLMGLHLSGPSHSQHYRHTPLETDFYDYKDDDDKTSGSGEGRGSLLTCGDVEENPGPHMTEYKPTVRLATRDDVPRAVRTLAAAFADYPATRHTVDPDRHIERVTELQELFLTRVGLDIGKVWVADDGAAVAVWTTPESVEAGAVFAEIGPRMAELSGSRLAAQQQMEGLLAPHRPKEPAWFLATVGVSPDHQGKGLGSAVVLPGVEAAERAGVPAFLETSAPRNLPFYERLGFTVTADVEVPEGPRTWCMTRKPGA

SEQ ID NO: 2798 - protein, 921 aa, Artificial Sequence
  Synthetic Polypeptide
MALPVTALLLPLALLLHAARPDELVMTQSPSSLTVTAGEKVTMSCKSSQSLLNSGNQKNYLTWYQQKPGQPPKLLIYWASTRESGVPDRFTGSGSGTDFTLTISSVQAEDLAVYYCQNDYSYPLTFGAGTKLEIKGGGGSGGGGSGGGGSEVQLLEQSGAELVRPGTSVKISCKASGYAFTNYWLGWVKQRPGHGLEWIGDIFPGSGNIHYNEKFKGKATLTADKSSSTAYMQLSSLTFEDSAVYFCARLRNWDEPMDYWGQGTTVTVSSTREQKLISEEDLAKPTTTPAPRPPTPAPTIASQPLSLRPEACRPAAGGAVHTRGLDFACDIYIWAPLAGTCGVLLLSLVITLYCGRARVKFSRSADAPAYQQGQNQLYNELNLGRREEYDVLDKRRGRDPEMGGKPRRKNPQEGLYNELQKDKMAEAYSEIGMKGERRRGKGHDGLYQGLSTATKDTYDALHMQALPPRSRGSGATNFSLLKQAGDVEENPGPGIHMATYEVLCEVARKLGTDDREVVLFLLNVFIPQPTLAQLIGALRALKEEGRLTFPLLAECLFRAGRRDLLRDLLHLDPRFLERHLAGTMSYFSPYQLTVLHVDGELCARDIRSLIFLSKDTIGSRSTPQTFLHWVYCMENLDLLGPTDVDALMSMLRSLSRVDLQRQVQTLMGLHLSGPSHSQHYRHTPLETDFYDYKDDDDKTSGSGEGRGSLLTCGDVEENPGPHMTEYKPTVRLATRDDVPRAVRTLAAAFADYPATRHTVDPDRHIERVTELQELFLTRVGLDIGKVWVADDGAAVAVWTTPESVEAGAVFAEIGPRMAELSGSRLAAQQQMEGLLAPHRPKEPAWFLATVGVSPDHQGKGLGSAVVLPGVEAAERAGVPAFLETSAPRNLPFYERLGFTVTADVEVPEGPRTWCMTRKPGA

SEQ ID NO: 2799 - protein, 922 aa, Artificial Sequence
  Synthetic Polypeptide
MALPVTALLLPLALLLHAARPDELQMTQSPSSLSASVGDRVTITCRASQSISSYLNWYQQKPGQPPKLLIYWASTRESGVPDRFSGSESGTNYTLTISSLQPEDFATYFCQQSDSLPITFGQGTRLDIQGGGGSGGGGSGGGGSEVQLLESGGGVVQPGRSLRLSCAASGFTFSSYGMHWVRQAPGKGLEWVAVISYDGSNKYYADSVKGRFTISRDNSKNTLYLQMNSLRAEDTAVYYCAKDMGWGSGWRPYYYYGMDVWGQGTTVTVSSTREQKLISEEDLAKPTTTPAPRPPTPAPTIASQPLSLRPEACRPAAGGAVHTRGLDFACDIYIWAPLAGTCGVLLLSLVITLYCGRARVKFSRSADAPAYQQGQNQLYNELNLGRREEYDVLDKRRGRDPEMGGKPRRKNPQEGLYNELQKDKMAEAYSEIGMKGERRRGKGHDGLYQGLSTATKDTYDALHMQALPPRSRGSGATNFSLLKQAGDVEENPGPGIHMATYEVLCEVARKLGTDDREVVLFLLNVFIPQPTLAQLIGALRALKEEGRLTFPLLAECLFRAGRRDLLRDLLHLDPRFLERHLAGTMSYFSPYQLTVLHVDGELCARDIRSLIFLSKDTIGSRSTPQTFLHWVYCMENLDLLGPTDVDALMSMLRSLSRVDLQRQVQTLMGLHLSGPSHSQHYRHTPLETDFYDYKDDDDKTSGSGEGRGSLLTCGDVEENPGPHMTEYKPTVRLATRDDVPRAVRTLAAAFADYPATRHTVDPDRHIERVTELQELFLTRVGLDIGKVWVADDGAAVAVWTTPESVEAGAVFAEIGPRMAELSGSRLAAQQQMEGLLAPHRPKEPAWFLATVGVSPDHQGKGLGSAVVLPGVEAAERAGVPAFLETSAPRNLPFYERLGFTVTADVEVPEGPRTWCMTRKPGA

SEQ ID NO: 2800 - protein, 919 aa, Artificial Sequence
  Synthetic Polypeptide
MALPVTALLLPLALLLHAARPDDIQMTQSPSSLSASVGDRVTITCRASQSISSYLNWYQQKPGKAPKLLIYAASSLQSGVPSRFSGSGSGTDFTLTISSLQPEDLATYYCQQSYSTPFTFGPGTKVDIKGGGGSGGGGSGGGGSVHEVQLVQSGAEVKKPGSSVKVSCKASGGTFSSYAISWVRQAPGQGLEWMGGIIPIFGTANYAQKFQGRVTITADKSTSTAYMELSSLRSEDTAVYYCATFALFGFREQAFDIWGQGTTVTVSSTREQKLISEEDLAKPTTTPAPRPPTPAPTIASQPLSLRPEACRPAAGGAVHTRGLDFACDIYIWAPLAGTCGVLLLSLVITLYCGRARVKFSRSADAPAYQQGQNQLYNELNLGRREEYDVLDKRRGRDPEMGGKPRRKNPQEGLYNELQKDKMAEAYSEIGMKGERRRGKGHDGLYQGLSTATKDTYDALHMQALPPRSRGSGATNFSLLKQAGDVEENPGPGIHMATYEVLCEVARKLGTDDREVVLFLLNVFIPQPTLAQLIGALRALKEEGRLTFPLLAECLFRAGRRDLLRDLLHLDPRFLERHLAGTMSYFSPYQLTVLHVDGELCARDIRSLIFLSKDTIGSRSTPQTFLHWVYCMENLDLLGPTDVDALMSMLRSLSRVDLQRQVQTLMGLHLSGPSHSQHYRHTPLETDFYDYKDDDDKTSGSGEGRGSLLTCGDVEENPGPHMTEYKPTVRLATRDDVPRAVRTLAAAFADYPATRHTVDPDRHIERVTELQELFLTRVGLDIGKVWVADDGAAVAVWTTPESVEAGAVFAEIGPRMAELSGSRLAAQQQMEGLLAPHRPKEPAWFLATVGVSPDHQGKGLGSAVVLPGVEAAERAGVPAFLETSAPRNLPFYERLGFTVTADVEVPEGPRTWCMTRKPGA

SEQ ID NO: 2801 - protein, 916 aa, Artificial Sequence
  Synthetic Polypeptide
MALPVTALLLPLALLLHAARPDVVMTQTPLSLPVSLGDQASISCRSSQSLVHSNGNTYLRWYLQKPGQSPKVLIYKVSNRFSGVPDRFSGSGSGTDFTLKISRVEAEDLGVYFCSQSTHVPWTFGGGTKLEIKGGGGSGGGGSGGGGSEVKLDETGGGLVQPGRPMKLSCVASGFTFSDYWMNWVRQSPEKGLEWVAQIRNKPYNYETYYSDSVKGRFTISRDDSKSSVYLQMNNLRVEDMGIYYCTGSYYGMDYWGQGTSVTVSTREQKLISEEDLAKPTTTPAPRPPTPAPTIASQPLSLRPEACRPAAGGAVHTRGLDFACDIYIWAPLAGTCGVLLLSLVITLYCGRARVKFSRSADAPAYQQGQNQLYNELNLGRREEYDVLDKRRGRDPEMGGKPRRKNPQEGLYNELQKDKMAEAYSEIGMKGERRRGKGHDGLYQGLSTATKDTYDALHMQALPPRSRGSGATNFSLLKQAGDVEENPGPGIHMATYEVLCEVARKLGTDDREVVLFLLNVFIPQPTLAQLIGALRALKEEGRLTFPLLAECLFRAGRRDLLRDLLHLDPRFLERHLAGTMSYFSPYQLTVLHVDGELCARDIRSLIFLSKDTIGSRSTPQTFLHWVYCMENLDLLGPTDVDALMSMLRSLSRVDLQRQVQTLMGLHLSGPSHSQHYRHTPLETDFYDYKDDDDKTSGSGEGRGSLLTCGDVEENPGPHMTEYKPTVRLATRDDVPRAVRTLAAAFADYPATRHTVDPDRHIERVTELQELFLTRVGLDIGKVWVADDGAAVAVWTTPESVEAGAVFAEIGPRMAELSGSRLAAQQQMEGLLAPHRPKEPAWFLATVGVSPDHQGKGLGSAVVLPGVEAAERAGVPAFLETSAPRNLPFYERLGFTVTADVEVPEGPRTWCMTRKPGA

SEQ ID NO: 2802 - protein, 927 aa, Artificial Sequence
  Synthetic Polypeptide
MALPVTALLLPLALLLHAARPDVVMTQTPLSLPVSLGDQASISCRSSQSLVHSNGNTYLRWYLQKPGQSPKVLIYKVSNRVSGVPDRFSGSGSGTDFTLKINRVEAEDLGVYFCSQSTHVPWTFGGGTKLEIKSSADDAKKDAAKKDDAKKDDAKKDGGVKLDETGGGLVQPGGAMKLSCVTSGFTFGHYWMNWVRQSPEKGLEWVAQFRNKPYNYETYYSDSVKGRFTISRDDSKSSVYLQMNNLRVEDTGIYYCTGASYGMEYLGQGTSVTVSTTREQKLISEEDLAKPTTTPAPRPPTPAPTIASQPLSLRPEACRPAAGGAVHTRGLDFACDIYIWAPLAGTCGVLLLSLVITLYCGRARVKFSRSADAPAYQQGQNQLYNELNLGRREEYDVLDKRRGRDPEMGGKPRRKNPQEGLYNELQKDKMAEAYSEIGMKGERRRGKGHDGLYQGLSTATKDTYDALHMQALPPRSRGSGATNFSLLKQAGDVEENPGPGIHMATYEVLCEVARKLGTDDREVVLFLLNVFIPQPTLAQLIGALRALKEEGRLTFPLLAECLFRAGRRDLLRDLLHLDPRFLERHLAGTMSYFSPYQLTVLHVDGELCARDIRSLIFLSKDTIGSRSTPQTFLHWVYCMENLDLLGPTDVDALMSMLRSLSRVDLQRQVQTLMGLHLSGPSHSQHYRHTPLETDFYDYKDDDDKTSGSGEGRGSLLTCGDVEENPGPHMTEYKPTVRLATRDDVPRAVRTLAAAFADYPATRHTVDPDRHIERVTELQELFLTRVGLDIGKVWVADDGAAVAVWTTPESVEAGAVFAEIGPRMAELSGSRLAAQQQMEGLLAPHRPKEPAWFLATVGVSPDHQGKGLGSAVVLPGVEAAERAGVPAFLETSAPRNLPFYERLGFTVTADVEVPEGPRTWCMTRKPGA

SEQ ID NO: 2803 - protein, 923 aa, Artificial Sequence
  Synthetic Polypeptide
MALPVTALLLPLALLLHAARPQVQLVESGGNLVQPGGSLRLSCAASGFTFGSFSMSWVRQAPGGGLEWVAGLSARSSLTHYADSVKGRFTISRDNAKNSVYLQMNSLRVEDTAVYYCARRSYDSSGYWGHFYSYMDVWGQGTLVTVSGGGGSGGGGSGGGGSSVLTQPSSVSAAPGQKVTISCSGSTSNIGNNYVSWYQQHPGKAPKLMIYDVSKRPSGVPDRFSGSKSGNSASLDISGLQSEDEADYYCAAWDDSLSEFLFGTGTKLTVLGTREQKLISEEDLAKPTTTPAPRPPTPAPTIASQPLSLRPEACRPAAGGAVHTRGLDFACDIYIWAPLAGTCGVLLLSLVITLYCGRARVKFSRSADAPAYQQGQNQLYNELNLGRREEYDVLDKRRGRDPEMGGKPRRKNPQEGLYNELQKDKMAEAYSEIGMKGERRRGKGHDGLYQGLSTATKDTYDALHMQALPPRSRGSGATNFSLLKQAGDVEENPGPGIHMATYEVLCEVARKLGTDDREVVLFLLNVFIPQPTLAQLIGALRALKEEGRLTFPLLAECLFRAGRRDLLRDLLHLDPRFLERHLAGTMSYFSPYQLTVLHVDGELCARDIRSLIFLSKDTIGSRSTPQTFLHWVYCMENLDLLGPTDVDALMSMLRSLSRVDLQRQVQTLMGLHLSGPSHSQHYRHTPLETDFYDYKDDDDKTSGSGEGRGSLLTCGDVEENPGPHMTEYKPTVRLATRDDVPRAVRTLAAAFADYPATRHTVDPDRHIERVTELQELFLTRVGLDIGKVWVADDGAAVAVWTTPESVEAGAVFAEIGPRMAELSGSRLAAQQQMEGLLAPHRPKEPAWFLATVGVSPDHQGKGLGSAVVLPGVEAAERAGVPAFLETSAPRNLPFYERLGFTVTADVEVPEGPRTWCMTRKPGA

SEQ ID NO: 2804 - protein, 918 aa, Artificial Sequence
  Synthetic Polypeptide
MALPVTALLLPLALLLHAARPDIQMTQSPSSLSASVGDRVTITCRTSQSLSSYTHWYQQKPGKAPKLLIYAASSRGSGVPSRFSGSGSGTDFTLTISSLQPEDFATYYCQQSRTFGQGTKVEIKGGGGSGGGGSGGGGSQVQLQQSGPGLVKPSQTLSLTCAISGDSVSSYNAVWNWIRQSPSRGLEWLGRTYYRSGWYNDYAESVKSRITINPDTSKNQFSLQLNSVTPEDTAVYYCARSGHITVFGVNVDAFDMWGQGTMVTVSSTREQKLISEEDLAKPTTTPAPRPPTPAPTIASQPLSLRPEACRPAAGGAVHTRGLDFACDIYIWAPLAGTCGVLLLSLVITLYCGRARVKFSRSADAPAYQQGQNQLYNELNLGRREEYDVLDKRRGRDPEMGGKPRRKNPQEGLYNELQKDKMAEAYSEIGMKGERRRGKGHDGLYQGLSTATKDTYDALHMQALPPRSRGSGATNFSLLKQAGDVEENPGPGIHMATYEVLCEVARKLGTDDREVVLFLLNVFIPQPTLAQLIGALRALKEEGRLTFPLLAECLFRAGRRDLLRDLLHLDPRFLERHLAGTMSYFSPYQLTVLHVDGELCARDIRSLIFLSKDTIGSRSTPQTFLHWVYCMENLDLLGPTDVDALMSMLRSLSRVDLQRQVQTLMGLHLSGPSHSQHYRHTPLETDFYDYKDDDDKTSGSGEGRGSLLTCGDVEENPGPHMTEYKPTVRLATRDDVPRAVRTLAAAFADYPATRHTVDPDRHIERVTELQELFLTRVGLDIGKVWVADDGAAVAVWTTPESVEAGAVFAEIGPRMAELSGSRLAAQQQMEGLLAPHRPKEPAWFLATVGVSPDHQGKGLGSAVVLPGVEAAERAGVPAFLETSAPRNLPFYERLGFTVTADVEVPEGPRTWCMTRKPGA

SEQ ID NO: 2805 - protein, 917 aa, Artificial Sequence
  Synthetic Polypeptide
MALPVTALLLPLALLLHAARPDIVLTQSPLSLAVSLGQPAIISCKASQSVSFAGTSLMHWYHQKPGQQPRLLIYRASNLEAGVPDRFSGSGSKTDFTLTISPVEAEDAATYYCQQSREYPYTFGGGTKLEIKRGGGGSGGGGSGGGGSQVQLVQSGAEVVKPGASVKISCKASGYTFTGYFMNWVKQSPGQSLEWIGRIHPYDGDTFYNQKFQGKATLTVDKSSNTAHMELLSLTSEDFAVYYCTRYDGSRAMDYWGQGTTVTVSSTREQKLISEEDLAKPTTTPAPRPPTPAPTIASQPLSLRPEACRPAAGGAVHTRGLDFACDIYIWAPLAGTCGVLLLSLVITLYCGRARVKFSRSADAPAYQQGQNQLYNELNLGRREEYDVLDKRRGRDPEMGGKPRRKNPQEGLYNELQKDKMAEAYSEIGMKGERRRGKGHDGLYQGLSTATKDTYDALHMQALPPRSRGSGATNFSLLKQAGDVEENPGPGIHMATYEVLCEVARKLGTDDREVVLFLLNVFIPQPTLAQLIGALRALKEEGRLTFPLLAECLFRAGRRDLLRDLLHLDPRFLERHLAGTMSYFSPYQLTVLHVDGELCARDIRSLIFLSKDTIGSRSTPQTFLHWVYCMENLDLLGPTDVDALMSMLRSLSRVDLQRQVQTLMGLHLSGPSHSQHYRHTPLETDFYDYKDDDDKTSGSGEGRGSLLTCGDVEENPGPHMTEYKPTVRLATRDDVPRAVRTLAAAFADYPATRHTVDPDRHIERVTELQELFLTRVGLDIGKVWVADDGAAVAVWTTPESVEAGAVFAEIGPRMAELSGSRLAAQQQMEGLLAPHRPKEPAWFLATVGVSPDHQGKGLGSAVVLPGVEAAERAGVPAFLETSAPRNLPFYERLGFTVTADVEVPEGPRTWCMTRKPGA

SEQ ID NO: 2806 - protein, 890 aa, Artificial Sequence
  Synthetic Polypeptide
MALPVTALLLPLALLLHAARPNSCELTNITIAIEKEECRFCISINTTWCAGYCYTRDLVYKDPARPKIQKTCTFKELVYETVRVPGCAHHADSLYTYPVATQCHCGKCDSDSTDCTVRGLGPSYCSFGEMKEGGGGSGGGGSGGGGSAPDVQDCPECTLQENPFFSQPGAPILQCMGCCFSRAYPTPLRSKKTMLVQKNVTSESTCCVAKSYNRVTVMGGFKVENHTACHCSTCYYHKSTREQKLISEEDLAKPTTTPAPRPPTPAPTIASQPLSLRPEACRPAAGGAVHTRGLDFACDIYIWAPLAGTCGVLLLSLVITLYCGRARVKFSRSADAPAYQQGQNQLYNELNLGRREEYDVLDKRRGRDPEMGGKPRRKNPQEGLYNELQKDKMAEAYSEIGMKGERRRGKGHDGLYQGLSTATKDTYDALHMQALPPRSRGSGATNFSLLKQAGDVEENPGPGIHMATYEVLCEVARKLGTDDREVVLFLLNVFIPQPTLAQLIGALRALKEEGRLTFPLLAECLFRAGRRDLLRDLLHLDPRFLERHLAGTMSYFSPYQLTVLHVDGELCARDIRSLIFLSKDTIGSRSTPQTFLHWVYCMENLDLLGPTDVDALMSMLRSLSRVDLQRQVQTLMGLHLSGPSHSQHYRHTPLETDFYDYKDDDDKTSGSGEGRGSLLTCGDVEENPGPHMTEYKPTVRLATRDDVPRAVRTLAAAFADYPATRHTVDPDRHIERVTELQELFLTRVGLDIGKVWVADDGAAVAVWTTPESVEAGAVFAEIGPRMAELSGSRLAAQQQMEGLLAPHRPKEPAWFLATVGVSPDHQGKGLGSAVVLPGVEAAERAGVPAFLETSAPRNLPFYERLGFTVTADVEVPEGPRTWCMTRKPGA

SEQ ID NO: 2807 - protein, 921 aa, Artificial Sequence
  Synthetic Polypeptide
MALPVTALLLPLALLLHAARPDLETTLTQSPATLSVSPGERVTLSCRASQSVGSNLAWYQQKFGQAPRLLIYDASTRATGIPARFSGSGSGTEFTLTISRLEPEDFAVYYCHQYGSSPRTFGQGTKVDIKRGGGGSGGGGSGGGGSQVQLVQSGAEVKKPGASVKVSCKASGYTFTTYGISWVRQAPGQGLEWMGWISAYNGHTNYAQMLQGRVTMTTDTSTSTAYMELRGLRSDDTAVYYCAREAYASYGSGSYWTDYWGQGTLVTVSSTREQKLISEEDLAKPTTTPAPRPPTPAPTIASQPLSLRPEACRPAAGGAVHTRGLDFACDIYIWAPLAGTCGVLLLSLVITLYCGRARVKFSRSADAPAYQQGQNQLYNELNLGRREEYDVLDKRRGRDPEMGGKPRRKNPQEGLYNELQKDKMAEAYSEIGMKGERRRGKGHDGLYQGLSTATKDTYDALHMQALPPRSRGSGATNFSLLKQAGDVEENPGPGIHMATYEVLCEVARKLGTDDREVVLFLLNVFIPQPTLAQLIGALRALKEEGRLTFPLLAECLFRAGRRDLLRDLLHLDPRFLERHLAGTMSYFSPYQLTVLHVDGELCARDIRSLIFLSKDTIGSRSTPQTFLHWVYCMENLDLLGPTDVDALMSMLRSLSRVDLQRQVQTLMGLHLSGPSHSQHYRHTPLETDFYDYKDDDDKTSGSGEGRGSLLTCGDVEENPGPHMTEYKPTVRLATRDDVPRAVRTLAAAFADYPATRHTVDPDRHIERVTELQELFLTRVGLDIGKVWVADDGAAVAVWTTPESVEAGAVFAEIGPRMAELSGSRLAAQQQMEGLLAPHRPKEPAWFLATVGVSPDHQGKGLGSAVVLPGVEAAERAGVPAFLETSAPRNLPFYERLGFTVTADVEVPEGPRTWCMTRKPGA

SEQ ID NO: 2808 - protein, 914 aa, Artificial Sequence
  Synthetic Polypeptide
MALPVTALLLPLALLLHAARPDDVVMTQTPLSLPVTPGEPASISCRSSQSLVHRNGNTYLHWYLQKPGQSPKLLIHKVSNRFSGVPDRFSGSGSGTDFTLKISRVEAEDLGVYFCSQSTHVPPLTFGAGTKLELKGGGGSGGGGSGGGGSEVQLVQSGAEVEKPGASVKISCKASGSSFTGYNMNWVRQNIGKSLEWIGAIDPYYGGTSYNQKFKGRATLTVDKSTSTAYMHLKSLRSEDTAVYYCVSGMEYWGQGTSVTVSSTREQKLISEEDLAKPTTTPAPRPPTPAPTIASQPLSLRPEACRPAAGGAVHTRGLDFACDIYIWAPLAGTCGVLLLSLVITLYCGRARVKFSRSADAPAYQQGQNQLYNELNLGRREEYDVLDKRRGRDPEMGGKPRRKNPQEGLYNELQKDKMAEAYSEIGMKGERRRGKGHDGLYQGLSTATKDTYDALHMQALPPRSRGSGATNFSLLKQAGDVEENPGPGIHMATYEVLCEVARKLGTDDREVVLFLLNVFIPQPTLAQLIGALRALKEEGRLTFPLLAECLFRAGRRDLLRDLLHLDPRFLERHLAGTMSYFSPYQLTVLHVDGELCARDIRSLIFLSKDTIGSRSTPQTFLHWVYCMENLDLLGPTDVDALMSMLRSLSRVDLQRQVQTLMGLHLSGPSHSQHYRHTPLETDFYDYKDDDDKTSGSGEGRGSLLTCGDVEENPGPHMTEYKPTVRLATRDDVPRAVRTLAAAFADYPATRHTVDPDRHIERVTELQELFLTRVGLDIGKVWVADDGAAVAVWTTPESVEAGAVFAEIGPRMAELSGSRLAAQQQMEGLLAPHRPKEPAWFLATVGVSPDHQGKGLGSAVVLPGVEAAERAGVPAFLETSAPRNLPFYERLGFTVTADVEVPEGPRTWCMTRKPGA

SEQ ID NO: 2809 - protein, 912 aa, Artificial Sequence
  Synthetic Polypeptide
MALPVTALLLPLALLLHAARPDEIVMTQTPATLSVSAGERVTITCKASQSVSNDVTWYQQKPGQAPRLLIYSASNRYSGVPARFSGSGYGTEFTFTISSVQSEDFAVYFCQQDYSSFGQGTKLEIKRGGGGSGGGGSGGGGSQVQLVESGPGVVQPGRSLRISCAVSGFSVTNYGVHWVRQPPGKGLEWLGVIWAGGITNYNSAFMSRLTISKDNSKNTVYLQMNSLRAEDTAMYYCASRGGHYGYALDYWGQGTLVTVSSTREQKLISEEDLAKPTTTPAPRPPTPAPTIASQPLSLRPEACRPAAGGAVHTRGLDFACDIYIWAPLAGTCGVLLLSLVITLYCGRARVKFSRSADAPAYQQGQNQLYNELNLGRREEYDVLDKRRGRDPEMGGKPRRKNPQEGLYNELQKDKMAEAYSEIGMKGERRRGKGHDGLYQGLSTATKDTYDALHMQALPPRSRGSGATNFSLLKQAGDVEENPGPGIHMATYEVLCEVARKLGTDDREVVLFLLNVFIPQPTLAQLIGALRALKEEGRLTFPLLAECLFRAGRRDLLRDLLHLDPRFLERHLAGTMSYFSPYQLTVLHVDGELCARDIRSLIFLSKDTIGSRSTPQTFLHWVYCMENLDLLGPTDVDALMSMLRSLSRVDLQRQVQTLMGLHLSGPSHSQHYRHTPLETDFYDYKDDDDKTSGSGEGRGSLLTCGDVEENPGPHMTEYKPTVRLATRDDVPRAVRTLAAAFADYPATRHTVDPDRHIERVTELQELFLTRVGLDIGKVWVADDGAAVAVWTTPESVEAGAVFAEIGPRMAELSGSRLAAQQQMEGLLAPHRPKEPAWFLATVGVSPDHQGKGLGSAVVLPGVEAAERAGVPAFLETSAPRNLPFYERLGFTVTADVEVPEGPRTWCMTRKPGA

SEQ ID NO: 2810 - protein, 914 aa, Artificial Sequence
  Synthetic Polypeptide
MALPVTALLLPLALLLHAARPDIQMTQTASSLPASLGDRVTISCSASQDISNYLNWYQQKPDGTVKLLIFYSSNLHSGVPSRFSGGGSGTDYSLTISNLEPEDIATYFCHQYSKLPWTFGGGTKLEIKRGGGGSGGGGSGGGGSEVTLVESGGDFVKPGGSLKVSCAASGFAFSHYAMSWVRQTPAKRLEWVAYISSGGSGTYYSDSVKGRFTISRDNAKNTLYLQMRSLRSEDSAMYFCTRVKLGTYYFDSWGQGTTLTVSSTREQKLISEEDLAKPTTTPAPRPPTPAPTIASQPLSLRPEACRPAAGGAVHTRGLDFACDIYIWAPLAGTCGVLLLSLVITLYCGRARVKFSRSADAPAYQQGQNQLYNELNLGRREEYDVLDKRRGRDPEMGGKPRRKNPQEGLYNELQKDKMAEAYSEIGMKGERRRGKGHDGLYQGLSTATKDTYDALHMQALPPRSRGSGATNFSLLKQAGDVEENPGPGIHMATYEVLCEVARKLGTDDREVVLFLLNVFIPQPTLAQLIGALRALKEEGRLTFPLLAECLFRAGRRDLLRDLLHLDPRFLERHLAGTMSYFSPYQLTVLHVDGELCARDIRSLIFLSKDTIGSRSTPQTFLHWVYCMENLDLLGPTDVDALMSMLRSLSRVDLQRQVQTLMGLHLSGPSHSQHYRHTPLETDFYDYKDDDDKTSGSGEGRGSLLTCGDVEENPGPHMTEYKPTVRLATRDDVPRAVRTLAAAFADYPATRHTVDPDRHIERVTELQELFLTRVGLDIGKVWVADDGAAVAVWTTPESVEAGAVFAEIGPRMAELSGSRLAAQQQMEGLLAPHRPKEPAWFLATVGVSPDHQGKGLGSAVVLPGVEAAERAGVPAFLETSAPRNLPFYERLGFTVTADVEVPEGPRTWCMTRKPGA

SEQ ID NO: 2811 - protein, 916 aa, Artificial Sequence
  Synthetic Polypeptide
MALPVTALLLPLALLLHAARPQFVLTQSPSASAALGASAKLTCTLSSAHKTYTIDWYQQQKGKAPRYLIQVKSDGTYTKATGVPDRFSGSSSGADRYLIIPSVQADDEADYYCGTDYTGGYVFGGGTQLTVTGGGGSGGGGSGGGGSEQLKESGGGLFKPTDTLTLTCTVSGFSLSYYGVNWVRQAPGNGLEWIGTIGGSGDTYYASWAKSRSTIIRNTNENTVTLKMTSLTAADTATYFCVRYANIGYEYFNVWGPGTLVTVSSTREQKLISEEDLAKPTTTPAPRPPTPAPTIASQPLSLRPEACRPAAGGAVHTRGLDFACDIYIWAPLAGTCGVLLLSLVITLYCGRARVKFSRSADAPAYQQGQNQLYNELNLGRREEYDVLDKRRGRDPEMGGKPRRKNPQEGLYNELQKDKMAEAYSEIGMKGERRRGKGHDGLYQGLSTATKDTYDALHMQALPPRSRGSGATNFSLLKQAGDVEENPGPGIHMATYEVLCEVARKLGTDDREVVLFLLNVFIPQPTLAQLIGALRALKEEGRLTFPLLAECLFRAGRRDLLRDLLHLDPRFLERHLAGTMSYFSPYQLTVLHVDGELCARDIRSLIFLSKDTIGSRSTPQTFLHWVYCMENLDLLGPTDVDALMSMLRSLSRVDLQRQVQTLMGLHLSGPSHSQHYRHTPLETDFYDYKDDDDKTSGSGEGRGSLLTCGDVEENPGPHMTEYKPTVRLATRDDVPRAVRTLAAAFADYPATRHTVDPDRHIERVTELQELFLTRVGLDIGKVWVADDGAAVAVWTTPESVEAGAVFAEIGPRMAELSGSRLAAQQQMEGLLAPHRPKEPAWFLATVGVSPDHQGKGLGSAVVLPGVEAAERAGVPAFLETSAPRNLPFYERLGFTVTADVEVPEGPRTWCMTRKPGA

SEQ ID NO: 2812 - protein, 921 aa, Artificial Sequence
  Synthetic Polypeptide
MALPVTALLLPLALLLHAARPQFVLTQSPSVSAALGASAKLTCTLSSAHKTYTIDWYQQQQGEAPRYLMQVKSDGSYTKGTGVPDRFSGSSSGADRYLIIPSVQADDEAGYVCGADDNGGYVFGGGTQLTVTGGGGSGGGGSGGGGSQSVKESEGGLFKPTDTLTLTCTVSGFSLSRHALTWVRQAPGNGLEWIGAIDNAGTTYYASWAKSRSTITRNTDLHTVTLKMTSLTASDTATYFCARVFYDINSGYYLDGMDLWGPGTLVTVSSTREQKLISEEDLAKPTTTPAPRPPTPAPTIASQPLSLRPEACRPAAGGAVHTRGLDFACDIYIWAPLAGTCGVLLLSLVITLYCGRARVKFSRSADAPAYQQGQNQLYNELNLGRREEYDVLDKRRGRDPEMGGKPRRKNPQEGLYNELQKDKMAEAYSEIGMKGERRRGKGHDGLYQGLSTATKDTYDALHMQALPPRSRGSGATNFSLLKQAGDVEENPGPGIHMATYEVLCEVARKLGTDDREVVLFLLNVFIPQPTLAQLIGALRALKEEGRLTFPLLAECLFRAGRRDLLRDLLHLDPRFLERHLAGTMSYFSPYQLTVLHVDGELCARDIRSLIFLSKDTIGSRSTPQTFLHWVYCMENLDLLGPTDVDALMSMLRSLSRVDLQRQVQTLMGLHLSGPSHSQHYRHTPLETDFYDYKDDDDKTSGSGEGRGSLLTCGDVEENPGPHMTEYKPTVRLATRDDVPRAVRTLAAAFADYPATRHTVDPDRHIERVTELQELFLTRVGLDIGKVWVADDGAAVAVWTTPESVEAGAVFAEIGPRMAELSGSRLAAQQQMEGLLAPHRPKEPAWFLATVGVSPDHQGKGLGSAVVLPGVEAAERAGVPAFLETSAPRNLPFYERLGFTVTADVEVPEGPRTWCMTRKPGA

SEQ ID NO: 2813 - protein, 915 aa, Artificial Sequence
  Synthetic Polypeptide
MALPVTALLLPLALLLHAARPDIQMTQSPSSLSASVGDRVTITCRASQGISSWLAWYQQKPEKAPKSLIYAASSLQSGVPSRFSGSGSGTDFTLTISSLQPEDFATYYCQQYNSYPPTFGGGTKVEIKGGGGSGGGGSGGGGSEVQLVESGGGLVQPGESLRLSCVASGFTFSRYKMNWVRQAPGKGLEWVSYISRSGRDIYYADSVKGRFTISRDNAKNSLYLQMNSLRDEDTAVYYCAGTVTTYYYFGMDVWGHGTTVTVSSTREQKLISEEDLAKPTTTPAPRPPTPAPTIASQPLSLRPEACRPAAGGAVHTRGLDFACDIYIWAPLAGTCGVLLLSLVITLYCGRARVKFSRSADAPAYQQGQNQLYNELNLGRREEYDVLDKRRGRDPEMGGKPRRKNPQEGLYNELQKDKMAEAYSEIGMKGERRRGKGHDGLYQGLSTATKDTYDALHMQALPPRSRGSGATNFSLLKQAGDVEENPGPGIHMATYEVLCEVARKLGTDDREVVLFLLNVFIPQPTLAQLIGALRALKEEGRLTFPLLAECLFRAGRRDLLRDLLHLDPRFLERHLAGTMSYFSPYQLTVLHVDGELCARDIRSLIFLSKDTIGSRSTPQTFLHWVYCMENLDLLGPTDVDALMSMLRSLSRVDLQRQVQTLMGLHLSGPSHSQHYRHTPLETDFYDYKDDDDKTSGSGEGRGSLLTCGDVEENPGPHMTEYKPTVRLATRDDVPRAVRTLAAAFADYPATRHTVDPDRHIERVTELQELFLTRVGLDIGKVWVADDGAAVAVWTTPESVEAGAVFAEIGPRMAELSGSRLAAQQQMEGLLAPHRPKEPAWFLATVGVSPDHQGKGLGSAVVLPGVEAAERAGVPAFLETSAPRNLPFYERLGFTVTADVEVPEGPRTWCMTRKPGA

SEQ ID NO: 2814 - protein, 916 aa, Artificial Sequence
  Synthetic Polypeptide
MALPVTALLLPLALLLHAARPDIQMTQSPSSLSASVGDRVTITCRASQGISSWLAWYQQKPEKAPKSLIYAASSLQSGVPSRFSGSGSGTDFTLTISSLQPEDFATYYCQQYNSYPPTFGGGTKVEIKGGGGSGGGGSGGGGSEVQLVESGGGSVQPGESLRLSCVASGFTFSRYKMNWVRQAPGKGLEWVSYISRSGRDIYYADSVKGRFTISRDNAKNSLYLQMNSLRDEDTAVYYCAGTVTTYYYDFGMDVWGQGTTVTVSSTREQKLISEEDLAKPTTTPAPRPPTPAPTIASQPLSLRPEACRPAAGGAVHTRGLDFACDIYIWAPLAGTCGVLLLSLVITLYCGRARVKFSRSADAPAYQQGQNQLYNELNLGRREEYDVLDKRRGRDPEMGGKPRRKNPQEGLYNELQKDKMAEAYSEIGMKGERRRGKGHDGLYQGLSTATKDTYDALHMQALPPRSRGSGATNFSLLKQAGDVEENPGPGIHMATYEVLCEVARKLGTDDREVVLFLLNVFIPQPTLAQLIGALRALKEEGRLTFPLLAECLFRAGRRDLLRDLLHLDPRFLERHLAGTMSYFSPYQLTVLHVDGELCARDIRSLIFLSKDTIGSRSTPQTFLHWVYCMENLDLLGPTDVDALMSMLRSLSRVDLQRQVQTLMGLHLSGPSHSQHYRHTPLETDFYDYKDDDDKTSGSGEGRGSLLTCGDVEENPGPHMTEYKPTVRLATRDDVPRAVRTLAAAFADYPATRHTVDPDRHIERVTELQELFLTRVGLDIGKVWVADDGAAVAVWTTPESVEAGAVFAEIGPRMAELSGSRLAAQQQMEGLLAPHRPKEPAWFLATVGVSPDHQGKGLGSAVVLPGVEAAERAGVPAFLETSAPRNLPFYERLGFTVTADVEVPEGPRTWCMTRKPGA

SEQ ID NO: 2815 - protein, 915 aa, Artificial Sequence
  Synthetic Polypeptide
MALPVTALLLPLALLLHAARPQSVLTQPPSASGTPGQRVTISCSGSRSNVGGNYVFWYQQVPGATPKLLIYRSNQRPSGVPDRFAGSKSGSSASLAISGLRSEDEADYYCATWDDSLSGFVFGTGTKVTVLGGGGGSGGGGSGGGGSEVQLVESGGGLVKPGGSLRLSCAASGFTFSDYYMSWIRQAPGKGLEWVSYISSSGSTIYYADSVKGRFTISRDNAKNSLYLQMNSLRAEDTAVYYCARGYGKAYDQWGQGTLVTVSSTREQKLISEEDLAKPTTTPAPRPPTPAPTIASQPLSLRPEACRPAAGGAVHTRGLDFACDIYIWAPLAGTCGVLLLSLVITLYCGRARVKFSRSADAPAYQQGQNQLYNELNLGRREEYDVLDKRRGRDPEMGGKPRRKNPQEGLYNELQKDKMAEAYSEIGMKGERRRGKGHDGLYQGLSTATKDTYDALHMQALPPRSRGSGATNFSLLKQAGDVEENPGPGIHMATYEVLCEVARKLGTDDREVVLFLLNVFIPQPTLAQLIGALRALKEEGRLTFPLLAECLFRAGRRDLLRDLLHLDPRFLERHLAGTMSYFSPYQLTVLHVDGELCARDIRSLIFLSKDTIGSRSTPQTFLHWVYCMENLDLLGPTDVDALMSMLRSLSRVDLQRQVQTLMGLHLSGPSHSQHYRHTPLETDFYDYKDDDDKTSGSGEGRGSLLTCGDVEENPGPHMTEYKPTVRLATRDDVPRAVRTLAAAFADYPATRHTVDPDRHIERVTELQELFLTRVGLDIGKVWVADDGAAVAVWTTPESVEAGAVFAEIGPRMAELSGSRLAAQQQMEGLLAPHRPKEPAWFLATVGVSPDHQGKGLGSAVVLPGVEAAERAGVPAFLETSAPRNLPFYERLGFTVTADVEVPEGPRTWCMTRKPGA

SEQ ID NO: 2816 - protein, 914 aa, Artificial Sequence
  Synthetic Polypeptide
MALPVTALLLPLALLLHAARPQSVVTQPPSMSAAPGQQVTISCSGGNSNIERNYVSWYLQLPGTAPKLVIFDNDRRPSGIPDRFSGSKSGTSATLGITGLQTGDEADYYCGTWDSSLRGWVFGGGTKLTVLGGGGGSGGGGSGGGGSEVQLVESGGGLIQPGGSLRLSCAASGFTFSNYAMNWVRQAPGKGLEWVSTINGRGSSTIYADSVKGRFTISRDNSKNTLYLQMNSLRAEDTATYYCARYISRGLGDSWGQGTLVTVTREQKLISEEDLAKPTTTPAPRPPTPAPTIASQPLSLRPEACRPAAGGAVHTRGLDFACDIYIWAPLAGTCGVLLLSLVITLYCGRARVKFSRSADAPAYQQGQNQLYNELNLGRREEYDVLDKRRGRDPEMGGKPRRKNPQEGLYNELQKDKMAEAYSEIGMKGERRRGKGHDGLYQGLSTATKDTYDALHMQALPPRSRGSGATNFSLLKQAGDVEENPGPGIHMATYEVLCEVARKLGTDDREVVLFLLNVFIPQPTLAQLIGALRALKEEGRLTFPLLAECLFRAGRRDLLRDLLHLDPRFLERHLAGTMSYFSPYQLTVLHVDGELCARDIRSLIFLSKDTIGSRSTPQTFLHWVYCMENLDLLGPTDVDALMSMLRSLSRVDLQRQVQTLMGLHLSGPSHSQHYRHTPLETDFYDYKDDDDKTSGSGEGRGSLLTCGDVEENPGPHMTEYKPTVRLATRDDVPRAVRTLAAAFADYPATRHTVDPDRHIERVTELQELFLTRVGLDIGKVWVADDGAAVAVWTTPESVEAGAVFAEIGPRMAELSGSRLAAQQQMEGLLAPHRPKEPAWFLATVGVSPDHQGKGLGSAVVLPGVEAAERAGVPAFLETSAPRNLPFYERLGFTVTADVEVPEGPRTWCMTRKPGA

SEQ ID NO: 2817 - protein, 914 aa, Artificial Sequence
  Synthetic Polypeptide
MALPVTALLLPLALLLHAARPQSVVTQPPSVSGAPGQRVTISCTGSSSNIGAGYDVHWYQQLPGTAPKLLIYGNSNRPSGVPDRFSGSKSGTSASLAITGLQAEDEADYYCQSYDSSLSGSYVFGTGTKLTVLGGGGGSGGGGSGGGGSEVQLVETGGNLVQPGASLRLSCAASGFSFSGTAMHWVRQAPGKGLEWVSTISSTGRSTYYRDSVKGRFTISRDNSKNTLYLQMNSLRGEDTAVYYCARVSFDYWGQGTLVTVSSTREQKLISEEDLAKPTTTPAPRPPTPAPTIASQPLSLRPEACRPAAGGAVHTRGLDFACDIYIWAPLAGTCGVLLLSLVITLYCGRARVKFSRSADAPAYQQGQNQLYNELNLGRREEYDVLDKRRGRDPEMGGKPRRKNPQEGLYNELQKDKMAEAYSEIGMKGERRRGKGHDGLYQGLSTATKDTYDALHMQALPPRSRGSGATNFSLLKQAGDVEENPGPGIHMATYEVLCEVARKLGTDDREVVLFLLNVFIPQPTLAQLIGALRALKEEGRLTFPLLAECLFRAGRRDLLRDLLHLDPRFLERHLAGTMSYFSPYQLTVLHVDGELCARDIRSLIFLSKDTIGSRSTPQTFLHWVYCMENLDLLGPTDVDALMSMLRSLSRVDLQRQVQTLMGLHLSGPSHSQHYRHTPLETDFYDYKDDDDKTSGSGEGRGSLLTCGDVEENPGPHMTEYKPTVRLATRDDVPRAVRTLAAAFADYPATRHTVDPDRHIERVTELQELFLTRVGLDIGKVWVADDGAAVAVWTTPESVEAGAVFAEIGPRMAELSGSRLAAQQQMEGLLAPHRPKEPAWFLATVGVSPDHQGKGLGSAVVLPGVEAAERAGVPAFLETSAPRNLPFYERLGFTVTADVEVPEGPRTWCMTRKPGA

SEQ ID NO: 2818 - protein, 916 aa, Artificial Sequence
  Synthetic Polypeptide
MALPVTALLLPLALLLHAARPQSVVTQPASVSGSPGQSITISCTGTSSDVGGYNYVSWYQQHPGKAPKLMIYDVSKRPSGVSNRFSGSKSGNTASLTISGLQAEDEADYYCSSYTSSSTLVFGGGTKLTVLGGGGGSGGGGSGGGGSEVQLVESGGAFVQPGGSLRLSCAASGFTFSSYAMTWVRQAPGKGLEWVSTISGRGRSTFYADSVKGRFTISRDNSKNTLYLQMNSLRAEDTAVYYCARYYHAGAFDLWGQGTLVTVSSTREQKLISEEDLAKPTTTPAPRPPTPAPTIASQPLSLRPEACRPAAGGAVHTRGLDFACDIYIWAPLAGTCGVLLLSLVITLYCGRARVKFSRSADAPAYQQGQNQLYNELNLGRREEYDVLDKRRGRDPEMGGKPRRKNPQEGLYNELQKDKMAEAYSEIGMKGERRRGKGHDGLYQGLSTATKDTYDALHMQALPPRSRGSGATNFSLLKQAGDVEENPGPGIHMATYEVLCEVARKLGTDDREVVLFLLNVFIPQPTLAQLIGALRALKEEGRLTFPLLAECLFRAGRRDLLRDLLHLDPRFLERHLAGTMSYFSPYQLTVLHVDGELCARDIRSLIFLSKDTIGSRSTPQTFLHWVYCMENLDLLGPTDVDALMSMLRSLSRVDLQRQVQTLMGLHLSGPSHSQHYRHTPLETDFYDYKDDDDKTSGSGEGRGSLLTCGDVEENPGPHMTEYKPTVRLATRDDVPRAVRTLAAAFADYPATRHTVDPDRHIERVTELQELFLTRVGLDIGKVWVADDGAAVAVWTTPESVEAGAVFAEIGPRMAELSGSRLAAQQQMEGLLAPHRPKEPAWFLATVGVSPDHQGKGLGSAVVLPGVEAAERAGVPAFLETSAPRNLPFYERLGFTVTADVEVPEGPRTWCMTRKPGA

SEQ ID NO: 2819 - protein, 914 aa, Artificial Sequence
  Synthetic Polypeptide
MALPVTALLLPLALLLHAARPDNIELTQSPAIMSASPGERVTMTCSASSSIRYIYWYQQKPGSSPRLLIYDTSNVAPGVPFRFSGSGSGTSYSLTINRMEAEDAATYYCQEWSGYPYTFGGGTKLDIKRGGGGSGGGGSGGGGSQVKLQESGGGLVKPGGSLKLSCAASGFTFSSYGMSWVRQTPDKRLEWVATISSGGSYTYYPDSVKGRFTISRDNAKNTLYLQMSSLKSEDTAMYYCARGNWEGWYFDVWGQGTTVTVSSTREQKLISEEDLAKPTTTPAPRPPTPAPTIASQPLSLRPEACRPAAGGAVHTRGLDFACDIYIWAPLAGTCGVLLLSLVITLYCGRARVKFSRSADAPAYQQGQNQLYNELNLGRREEYDVLDKRRGRDPEMGGKPRRKNPQEGLYNELQKDKMAEAYSEIGMKGERRRGKGHDGLYQGLSTATKDTYDALHMQALPPRSRGSGATNFSLLKQAGDVEENPGPGIHMATYEVLCEVARKLGTDDREVVLFLLNVFIPQPTLAQLIGALRALKEEGRLTFPLLAECLFRAGRRDLLRDLLHLDPRFLERHLAGTMSYFSPYQLTVLHVDGELCARDIRSLIFLSKDTIGSRSTPQTFLHWVYCMENLDLLGPTDVDALMSMLRSLSRVDLQRQVQTLMGLHLSGPSHSQHYRHTPLETDFYDYKDDDDKTSGSGEGRGSLLTCGDVEENPGPHMTEYKPTVRLATRDDVPRAVRTLAAAFADYPATRHTVDPDRHIERVTELQELFLTRVGLDIGKVWVADDGAAVAVWTTPESVEAGAVFAEIGPRMAELSGSRLAAQQQMEGLLAPHRPKEPAWFLATVGVSPDHQGKGLGSAVVLPGVEAAERAGVPAFLETSAPRNLPFYERLGFTVTADVEVPEGPRTWCMTRKPGA

SEQ ID NO: 2820 - protein, 924 aa, Artificial Sequence
  Synthetic Polypeptide
MALPVTALLLPLALLLHAARPDNFMLTQPHSVSESPGKTVTISCTGSGGSIDNNYVHWYQQRPGSAPTTVMFEDNQRPSGVPDRFSGSIDSSSNSASLVISGLKTEDEGDYYCQSSDGSKVVFGGGTKLTVLGQGGGGSGGGGSGGGGSEVQLVQSGGGSLTLSCAASGVVQPGRFTFSSYGMHWVRQAPGKGLEWVSVISYDGSNKYYADSVKGRFTISRDNSKNTLYLQMNSLRTEDTAVYYCAKTLSAGEWIGGGAFDIWGHGTMVTVSSTREQKLISEEDLAKPTTTPAPRPPTPAPTIASQPLSLRPEACRPAAGGAVHTRGLDFACDIYIWAPLAGTCGVLLLSLVITLYCGRARVKFSRSADAPAYQQGQNQLYNELNLGRREEYDVLDKRRGRDPEMGGKPRRKNPQEGLYNELQKDKMAEAYSEIGMKGERRRGKGHDGLYQGLSTATKDTYDALHMQALPPRSRGSGATNFSLLKQAGDVEENPGPGIHMATYEVLCEVARKLGTDDREVVLFLLNVFIPQPTLAQLIGALRALKEEGRLTFPLLAECLFRAGRRDLLRDLLHLDPRFLERHLAGTMSYFSPYQLTVLHVDGELCARDIRSLIFLSKDTIGSRSTPQTFLHWVYCMENLDLLGPTDVDALMSMLRSLSRVDLQRQVQTLMGLHLSGPSHSQHYRHTPLETDFYDYKDDDDKTSGSGEGRGSLLTCGDVEENPGPHMTEYKPTVRLATRDDVPRAVRTLAAAFADYPATRHTVDPDRHIERVTELQELFLTRVGLDIGKVWVADDGAAVAVWTTPESVEAGAVFAEIGPRMAELSGSRLAAQQQMEGLLAPHRPKEPAWFLATVGVSPDHQGKGLGSAVVLPGVEAAERAGVPAFLETSAPRNLPFYERLGFTVTADVEVPEGPRTWCMTRKPGA

SEQ ID NO: 2821 - protein, 914 aa, Artificial Sequence
  Synthetic Polypeptide
MALPVTALLLPLALLLHAARPDVVMTQTPLSLPVSLGDQASISCRSSQSLVHSNGNTYLHWYLQKPGQSPKLLIYKVSNRFSGVPDRFSGSGSGTDFTLKISRVEAEDLGVYFCSQNTPVPPKFGSGTKLEIKGGGGSGGGGSGGGGSQVQLQQSGAELVRPGASVKLSCKASGYTFNDYEMHWVKQTPVHGLKWIGALEPKTGDTAYSQKFKGKATLTADKSSSTAYMELRSLTSEDSAVYYCTSCYYYTYSGQGTLVTVSATREQKLISEEDLAKPTTTPAPRPPTPAPTIASQPLSLRPEACRPAAGGAVHTRGLDFACDIYIWAPLAGTCGVLLLSLVITLYCGRARVKFSRSADAPAYQQGQNQLYNELNLGRREEYDVLDKRRGRDPEMGGKPRRKNPQEGLYNELQKDKMAEAYSEIGMKGERRRGKGHDGLYQGLSTATKDTYDALHMQALPPRSRGSGATNFSLLKQAGDVEENPGPGIHMATYEVLCEVARKLGTDDREVVLFLLNVFIPQPTLAQLIGALRALKEEGRLTFPLLAECLFRAGRRDLLRDLLHLDPRFLERHLAGTMSYFSPYQLTVLHVDGELCARDIRSLIFLSKDTIGSRSTPQTFLHWVYCMENLDLLGPTDVDALMSMLRSLSRVDLQRQVQTLMGLHLSGPSHSQHYRHTPLETDFYDYKDDDDKTSGSGEGRGSLLTCGDVEENPGPHMTEYKPTVRLATRDDVPRAVRTLAAAFADYPATRHTVDPDRHIERVTELQELFLTRVGLDIGKVWVADDGAAVAVWTTPESVEAGAVFAEIGPRMAELSGSRLAAQQQMEGLLAPHRPKEPAWFLATVGVSPDHQGKGLGSAVVLPGVEAAERAGVPAFLETSAPRNLPFYERLGFTVTADVEVPEGPRTWCMTRKPGA

SEQ ID NO: 2822 - protein, 913 aa, Artificial Sequence
  Synthetic Polypeptide
MALPVTALLLPLALLLHAARPDIQLTQSPSSLSASVGDRVTITCRASQGIRNDLGWYQQKPGKAPKRLIYAASSLQNGVPSRFSGSGSGTEFTLTISSLQPEDFATYYCLQHNTYPAFGQGTKVEIKRGGGGSGGGGSGGGGSQVQLQESGPGLVKPSQTLSLTCTVSGGSISSFNYYWSWIRHHPGKGLEWIGYIYYSGSTYSNPSLKSRVTISVDTSKNQFSLTLSSVTAADTAVYYCARGYNWNYFDYWGQGTLVTVSSTREQKLISEEDLAKPTTTPAPRPPTPAPTIASQPLSLRPEACRPAAGGAVHTRGLDFACDIYIWAPLAGTCGVLLLSLVITLYCGRARVKFSRSADAPAYQQGQNQLYNELNLGRREEYDVLDKRRGRDPEMGGKPRRKNPQEGLYNELQKDKMAEAYSEIGMKGERRRGKGHDGLYQGLSTATKDTYDALHMQALPPRSRGSGATNFSLLKQAGDVEENPGPGIHMATYEVLCEVARKLGTDDREVVLFLLNVFIPQPTLAQLIGALRALKEEGRLTFPLLAECLFRAGRRDLLRDLLHLDPRFLERHLAGTMSYFSPYQLTVLHVDGELCARDIRSLIFLSKDTIGSRSTPQTFLHWVYCMENLDLLGPTDVDALMSMLRSLSRVDLQRQVQTLMGLHLSGPSHSQHYRHTPLETDFYDYKDDDDKTSGSGEGRGSLLTCGDVEENPGPHMTEYKPTVRLATRDDVPRAVRTLAAAFADYPATRHTVDPDRHIERVTELQELFLTRVGLDIGKVWVADDGAAVAVWTTPESVEAGAVFAEIGPRMAELSGSRLAAQQQMEGLLAPHRPKEPAWFLATVGVSPDHQGKGLGSAVVLPGVEAAERAGVPAFLETSAPRNLPFYERLGFTVTADVEVPEGPRTWCMTRKPGA

SEQ ID NO: 2823 - protein, 915 aa, Artificial Sequence
  Synthetic Polypeptide
MALPVTALLLPLALLLHAARPDDIVLTQSPASLAVSLGQSVTISCRASESVEYYGTSLMQWYQQKPGQPPKLLIYATSNVESGVPARFSGSGSGTDFSLNIHPVEEDDIAMYFCQQSRKLPSTFGGGTKLEIKGGGGSGGGGSGGGGSDVRLQESGPGQVKPSQTVSLTCSVTGYSITNGNHWWNWIRQVSGSKLEWIGYISSSGSTDSNPSLKSRISITRDTSKNQLFLQLNSVTTEDIATYYCARGYYFDYWGQGTTLTVSSTREQKLISEEDLAKPTTTPAPRPPTPAPTIASQPLSLRPEACRPAAGGAVHTRGLDFACDIYIWAPLAGTCGVLLLSLVITLYCGRARVKFSRSADAPAYQQGQNQLYNELNLGRREEYDVLDKRRGRDPEMGGKPRRKNPQEGLYNELQKDKMAEAYSEIGMKGERRRGKGHDGLYQGLSTATKDTYDALHMQALPPRSRGSGATNFSLLKQAGDVEENPGPGIHMATYEVLCEVARKLGTDDREVVLFLLNVFIPQPTLAQLIGALRALKEEGRLTFPLLAECLFRAGRRDLLRDLLHLDPRFLERHLAGTMSYFSPYQLTVLHVDGELCARDIRSLIFLSKDTIGSRSTPQTFLHWVYCMENLDLLGPTDVDALMSMLRSLSRVDLQRQVQTLMGLHLSGPSHSQHYRHTPLETDFYDYKDDDDKTSGSGEGRGSLLTCGDVEENPGPHMTEYKPTVRLATRDDVPRAVRTLAAAFADYPATRHTVDPDRHIERVTELQELFLTRVGLDIGKVWVADDGAAVAVWTTPESVEAGAVFAEIGPRMAELSGSRLAAQQQMEGLLAPHRPKEPAWFLATVGVSPDHQGKGLGSAVVLPGVEAAERAGVPAFLETSAPRNLPFYERLGFTVTADVEVPEGPRTWCMTRKPGA

SEQ ID NO: 2824 - protein, 793 aa, Artificial Sequence
  Synthetic Polypeptide
MALPVTALLLPLALLLHAARPDEFEVQLVESGGGLVQAGGSLRLSCAASGITFSINTMGWYRQAPGKQRELVALISSIGDTYYADSVKGRFTISRDNAKNTVYLQMNSLKPEDTAVYYCKRFRTAAQGTDYWGQGTQVTVSSTREQKLISEEDLAKPTTTPAPRPPTPAPTIASQPLSLRPEACRPAAGGAVHTRGLDFACDIYIWAPLAGTCGVLLLSLVITLYCGRARVKFSRSADAPAYQQGQNQLYNELNLGRREEYDVLDKRRGRDPEMGGKPRRKNPQEGLYNELQKDKMAEAYSEIGMKGERRRGKGHDGLYQGLSTATKDTYDALHMQALPPRSRGSGATNFSLLKQAGDVEENPGPGIHMATYEVLCEVARKLGTDDREVVLFLLNVFIPQPTLAQLIGALRALKEEGRLTFPLLAECLFRAGRRDLLRDLLHLDPRFLERHLAGTMSYFSPYQLTVLHVDGELCARDIRSLIFLSKDTIGSRSTPQTFLHWVYCMENLDLLGPTDVDALMSMLRSLSRVDLQRQVQTLMGLHLSGPSHSQHYRHTPLETDFYDYKDDDDKTSGSGEGRGSLLTCGDVEENPGPHMTEYKPTVRLATRDDVPRAVRTLAAAFADYPATRHTVDPDRHIERVTELQELFLTRVGLDIGKVWVADDGAAVAVWTTPESVEAGAVFAEIGPRMAELSGSRLAAQQQMEGLLAPHRPKEPAWFLATVGVSPDHQGKGLGSAVVLPGVEAAERAGVPAFLETSAPRNLPFYERLGFTVTADVEVPEGPRTWCMTRKPGA

SEQ ID NO: 2825 - protein, 728 aa, Artificial Sequence
  Synthetic Polypeptide
MDWIWRILFLVGAATGAHSFEGSGFEYAKEMRNAYWEIALLPNLTNQQKRAPIRKLYDDPSQSSELLSEAKKLNDSQTREQKLISEEDLAKPTTTPAPRPPTPAPTIASQPLSLRPEACRPAAGGAVHTRGLDFACDIYIWAPLAGTCGVLLLSLVITLYCGRARVKFSRSADAPAYQQGQNQLYNELNLGRREEYDVLDKRRGRDPEMGGKPRRKNPQEGLYNELQKDKMAEAYSEIGMKGERRRGKGHDGLYQGLSTATKDTYDALHMQALPPRSRGSGATNFSLLKQAGDVEENPGPGIHMATYEVLCEVARKLGTDDREVVLFLLNVFIPQPTLAQLIGALRALKEEGRLTFPLLAECLFRAGRRDLLRDLLHLDPRFLERHLAGTMSYFSPYQLTVLHVDGELCARDIRSLIFLSKDTIGSRSTPQTFLHWVYCMENLDLLGPTDVDALMSMLRSLSRVDLQRQVQTLMGLHLSGPSHSQHYRHTPLETDFYDYKDDDDKTSGSGEGRGSLLTCGDVEENPGPHMTEYKPTVRLATRDDVPRAVRTLAAAFADYPATRHTVDPDRHIERVTELQELFLTRVGLDIGKVWVADDGAAVAVWTTPESVEAGAVFAEIGPRMAELSGSRLAAQQQMEGLLAPHRPKEPAWFLATVGVSPDHQGKGLGSAVVLPGVEAAERAGVPAFLETSAPRNLPFYERLGFTVTADVEVPEGPRTWCMTRKPGA

SEQ ID NO: 2826 - protein, 799 aa, Artificial Sequence
  Synthetic Polypeptide
MALPVTALLLPLALLLHAARPDEFGSDLGIKLLFAAAKGQDDEVRILLAAGADVNAKDFEGYTPLHVAAYDGHLEIVEVLLKAGADVNAKDSQGRTPLHEAAYSGHLEIVEVLLKAGADVNAQDDAGETPADLAAAWGHEDIAEVLQKTREQKLISEEDLAKPTTTPAPRPPTPAPTIASQPLSLRPEACRPAAGGAVHTRGLDFACDIYIWAPLAGTCGVLLLSLVITLYCGRARVKFSRSADAPAYQQGQNQLYNELNLGRREEYDVLDKRRGRDPEMGGKPRRKNPQEGLYNELQKDKMAEAYSEIGMKGERRRGKGHDGLYQGLSTATKDTYDALHMQALPPRSRGSGATNFSLLKQAGDVEENPGPGIHMATYEVLCEVARKLGTDDREVVLFLLNVFIPQPTLAQLIGALRALKEEGRLTFPLLAECLFRAGRRDLLRDLLHLDPRFLERHLAGTMSYFSPYQLTVLHVDGELCARDIRSLIFLSKDTIGSRSTPQTFLHWVYCMENLDLLGPTDVDALMSMLRSLSRVDLQRQVQTLMGLHLSGPSHSQHYRHTPLETDFYDYKDDDDKTSGSGEGRGSLLTCGDVEENPGPHMTEYKPTVRLATRDDVPRAVRTLAAAFADYPATRHTVDPDRHIERVTELQELFLTRVGLDIGKVWVADDGAAVAVWTTPESVEAGAVFAEIGPRMAELSGSRLAAQQQMEGLLAPHRPKEPAWFLATVGVSPDHQGKGLGSAVVLPGVEAAERAGVPAFLETSAPRNLPFYERLGFTVTADVEVPEGPRTWCMTRKPGA

SEQ ID NO: 2827 - protein, 798 aa, Artificial Sequence
  Synthetic Polypeptide
MDWIWRILFLVGAATGAHSFERSDLGKKLLEAARAGQDDEVRILMANGADVNAKDEYGLTPLYLATAHGHLEIVEVLLKNGADVNAVDAIGFTPLHLAAFIGHLEIAEVLLKHGADVNAQDKFGKTAFDISIGNGNEDLAEILQKLNTREQKLISEEDLAKPTTTPAPRPPTPAPTIASQPLSLRPEACRPAAGGAVHTRGLDFACDIYIWAPLAGTCGVLLLSLVITLYCGRARVKFSRSADAPAYQQGQNQLYNELNLGRREEYDVLDKRRGRDPEMGGKPRRKNPQEGLYNELQKDKMAEAYSEIGMKGERRRGKGHDGLYQGLSTATKDTYDALHMQALPPRSRGSGATNFSLLKQAGDVEENPGPGIHMATYEVLCEVARKLGTDDREVVLFLLNVFIPQPTLAQLIGALRALKEEGRLTFPLLAECLFRAGRRDLLRDLLHLDPRFLERHLAGTMSYFSPYQLTVLHVDGELCARDIRSLIFLSKDTIGSRSTPQTFLHWVYCMENLDLLGPTDVDALMSMLRSLSRVDLQRQVQTLMGLHLSGPSHSQHYRHTPLETDFYDYKDDDDKTSGSGEGRGSLLTCGDVEENPGPHMTEYKPTVRLATRDDVPRAVRTLAAAFADYPATRHTVDPDRHIERVTELQELFLTRVGLDIGKVWVADDGAAVAVWTTPESVEAGAVFAEIGPRMAELSGSRLAAQQQMEGLLAPHRPKEPAWFLATVGVSPDHQGKGLGSAVVLPGVEAAERAGVPAFLETSAPRNLPFYERLGFTVTADVEVPEGPRTWCMTRKPGA

SEQ ID NO: 2828 - protein, 950 aa, Artificial Sequence
  Synthetic Polypeptide
MALPVTALLLPLALLLHAARPDEFEVQLVESGGGLVQAGGSLRLSCAASGITFSINTMGWYRQAPGKQRELVALISSIGDTYYADSVKGRFTISRDNAKNTVYLQMNSLKPEDTAVYYCKRFRTAAQGTDYWGQGTQVTVSSLEGGGGSGGGGSGGGGSGSGGSGSGGSGSGGSGSGGSFEVQLVESGGGLVQPGGSLRLSCAASGSIFGFNDMAWYRQAPGKQRELVALISRVGVTSSADSVKGRFTISRVNAKDTVYLQMNSLKPEDTAVYYCYMDQRLDGSTLAYWGQGTQVTVSSTREQKLISEEDLAKPTTTPAPRPPTPAPTIASQPLSLRPEACRPAAGGAVHTRGLDFACDIYIWAPLAGTCGVLLLSLVITLYCGRARVKFSRSADAPAYQQGQNQLYNELNLGRREEYDVLDKRRGRDPEMGGKPRRKNPQEGLYNELQKDKMAEAYSEIGMKGERRRGKGHDGLYQGLSTATKDTYDALHMQALPPRSRGSGATNFSLLKQAGDVEENPGPGIHMATYEVLCEVARKLGTDDREVVLFLLNVFIPQPTLAQLIGALRALKEEGRLTFPLLAECLFRAGRRDLLRDLLHLDPRFLERHLAGTMSYFSPYQLTVLHVDGELCARDIRSLIFLSKDTIGSRSTPQTFLHWVYCMENLDLLGPTDVDALMSMLRSLSRVDLQRQVQTLMGLHLSGPSHSQHYRHTPLETDFYDYKDDDDKTSGSGEGRGSLLTCGDVEENPGPHMTEYKPTVRLATRDDVPRAVRTLAAAFADYPATRHTVDPDRHIERVTELQELFLTRVGLDIGKVWVADDGAAVAVWTTPESVEAGAVFAEIGPRMAELSGSRLAAQQQMEGLLAPHRPKEPAWFLATVGVSPDHQGKGLGSAVVLPGVEAAERAGVPAFLETSAPRNLPFYERLGFTVTADVEVPEGPRTWCMTRKPGA

SEQ ID NO: 2829 - protein, 914 aa, Artificial Sequence
  Synthetic Polypeptide
MALPVTALLLPLALLLHAARPDIQMTQSPSSLSASVGDRVTITCRASQDVNTAVAWYQQKPGKAPKLLIYSASFLESGVPSRFSGSRSGTDFTLTISSLQPEDFATYYCQQHYTTPPTFGQTKVEIKRGGGGSGGGGSGGGGSEVQLVESGGGLVQPGGSLRLSCAASGFNIKDTYIHWVRQAPGKGLEWVARIYPTNGYTRYADSVKGRFTISADTSKNTAYLQMNSLRAEDTAVYYCSRWGGDGFYAMDVWGQGTLVTVSSTREQKLISEEDLAKPTTTPAPRPPTPAPTIASQPLSLRPEACRPAAGGAVHTRGLDFACDIYIWAPLAGTCGVLLLSLVITLYCGRARVKFSRSADAPAYQQGQNQLYNELNLGRREEYDVLDKRRGRDPEMGGKPRRKNPQEGLYNELQKDKMAEAYSEIGMKGERRRGKGHDGLYQGLSTATKDTYDALHMQALPPRSRGSGATNFSLLKQAGDVEENPGPGIHMATYEVLCEVARKLGTDDREVVLFLLNVFIPQPTLAQLIGALRALKEEGRLTFPLLAECLFRAGRRDLLRDLLHLDPRFLERHLAGTMSYFSPYQLTVLHVDGELCARDIRSLIFLSKDTIGSRSTPQTFLHWVYCMENLDLLGPTDVDALMSMLRSLSRVDLQRQVQTLMGLHLSGPSHSQHYRHTPLETDFYDYKDDDDKTSGSGEGRGSLLTCGDVEENPGPHMTEYKPTVRLATRDDVPRAVRTLAAAFADYPATRHTVDPDRHIERVTELQELFLTRVGLDIGKVWVADDGAAVAVWTTPESVEAGAVFAEIGPRMAELSGSRLAAQQQMEGLLAPHRPKEPAWFLATVGVSPDHQGKGLGSAVVLPGVEAAERAGVPAFLETSAPRNLPFYERLGFTVTADVEVPEGPRTWCMTRKPGA

SEQ ID NO: 2830 - protein, 793 aa, Artificial Sequence
  Synthetic Polypeptide
MALPVTALLLPLALLLHAARPDEFDVQLVESGGGLVQPGGSLRLSCAASGSIGGLNAMAWYRQAPGKERELVAGIFGVGSTRYADSVKGRFTISRDNSKNTVYLQMNSLRPEDTAVYYCRMSSVTRGSSDYWGQGTLVTVSSTREQKLISEEDLAKPTTTPAPRPPTPAPTIASQPLSLRPEACRPAAGGAVHTRGLDFACDIYIWAPLAGTCGVLLLSLVITLYCGRARVKFSRSADAPAYQQGQNQLYNELNLGRREEYDVLDKRRGRDPEMGGKPRRKNPQEGLYNELQKDKMAEAYSEIGMKGERRRGKGHDGLYQGLSTATKDTYDALHMQALPPRSRGSGATNFSLLKQAGDVEENPGPGIHMATYEVLCEVARKLGTDDREVVLFLLNVFIPQPTLAQLIGALRALKEEGRLTFPLLAECLFRAGRRDLLRDLLHLDPRFLERHLAGTMSYFSPYQLTVLHVDGELCARDIRSLIFLSKDTIGSRSTPQTFLHWVYCMENLDLLGPTDVDALMSMLRSLSRVDLQRQVQTLMGLHLSGPSHSQHYRHTPLETDFYDYKDDDDKTSGSGEGRGSLLTCGDVEENPGPHMTEYKPTVRLATRDDVPRAVRTLAAAFADYPATRHTVDPDRHIERVTELQELFLTRVGLDIGKVWVADDGAAVAVWTTPESVEAGAVFAEIGPRMAELSGSRLAAQQQMEGLLAPHRPKEPAWFLATVGVSPDHQGKGLGSAVVLPGVEAAERAGVPAFLETSAPRNLPFYERLGFTVTADVEVPEGPRTWCMTRKPGA

SEQ ID NO: 2831 - protein, 733 aa, Artificial Sequence
  Synthetic Polypeptide
MALPVTALLLPLALLLHAARPDEFVDNKFNKERYSAYYEIWQLPNLNVRQKAAFIGSLQDDPSQSANLLAEAKKLNDAQAPKTREQKLISEEDLAKPTTTPAPRPPTPAPTIASQPLSLRPEACRPAAGGAVHTRGLDFACDIYIWAPLAGTCGVLLLSLVITLYCGRARVKFSRSADAPAYQQGQNQLYNELNLGRREEYDVLDKRRGRDPEMGGKPRRKNPQEGLYNELQKDKMAEAYSEIGMKGERRRGKGHDGLYQGLSTATKDTYDALHMQALPPRSRGSGATNFSLLKQAGDVEENPGPGIHMATYEVLCEVARKLGTDDREVVLFLLNVFIPQPTLAQLIGALRALKEEGRLTFPLLAECLFRAGRRDLLRDLLHLDPRFLERHLAGTMSYFSPYQLTVLHVDGELCARDIRSLIFLSKDTIGSRSTPQTFLHWVYCMENLDLLGPTDVDALMSMLRSLSRVDLQRQVQTLMGLHLSGPSHSQHYRHTPLETDFYDYKDDDDKTSGSGEGRGSLLTCGDVEENPGPHMTEYKPTVRLATRDDVPRAVRTLAAAFADYPATRHTVDPDRHIERVTELQELFLTRVGLDIGKVWVADDGAAVAVWTTPESVEAGAVFAEIGPRMAELSGSRLAAQQQMEGLLAPHRPKEPAWFLATVGVSPDHQGKGLGSAVVLPGVEAAERAGVPAFLETSAPRNLPFYERLGFTVTADVEVPEGPRTWCMTRKPGA

SEQ ID NO: 2832 - protein, 955 aa, Artificial Sequence
  Synthetic Polypeptide
MALPVTALLLPLALLLHAARPDEFDVQLVESGGGLVQPGGSLRLSCAASGSIGGLNAMAWYRQAPGKERELVAGIFGVGSTRYADSVKGRFTISRDNSKNTVYLQMNSLRPEDTAVYYCRMSSVTRGSSDYWGQGTLVTVSSLEGGGGSGGGGSGGGGSGSGGSGSGGSGSGGSGSGGSFEVQLVESGGSLVQPGGSLRLSCAASGFTFDDYAMSWVRQVPGKGLEWVSSINWSGTHTDYADSVKGRFTISRNNANNTLYLQMNSLKSEDTAVYYCAKNWRDAGTTWFEKSGSAGQGTQVTVSSTREQKLISEEDLAKPTTTPAPRPPTPAPTIASQPLSLRPEACRPAAGGAVHTRGLDFACDIYIWAPLAGTCGVLLLSLVITLYCGRARVKFSRSADAPAYQQGQNQLYNELNLGRREEYDVLDKRRGRDPEMGGKPRRKNPQEGLYNELQKDKMAEAYSEIGMKGERRRGKGHDGLYQGLSTATKDTYDALHMQALPPRSRGSGATNFSLLKQAGDVEENPGPGIHMATYEVLCEVARKLGTDDREVVLFLLNVFIPQPTLAQLIGALRALKEEGRLTFPLLAECLFRAGRRDLLRDLLHLDPRFLERHLAGTMSYFSPYQLTVLHVDGELCARDIRSLIFLSKDTIGSRSTPQTFLHWVYCMENLDLLGPTDVDALMSMLRSLSRVDLQRQVQTLMGLHLSGPSHSQHYRHTPLETDFYDYKDDDDKTSGSGEGRGSLLTCGDVEENPGPHMTEYKPTVRLATRDDVPRAVRTLAAAFADYPATRHTVDPDRHIERVTELQELFLTRVGLDIGKVWVADDGAAVAVWTTPESVEAGAVFAEIGPRMAELSGSRLAAQQQMEGLLAPHRPKEPAWFLATVGVSPDHQGKGLGSAVVLPGVEAAERAGVPAFLETSAPRNLPFYERLGFTVTADVEVPEGPRTWCMTRKPGA

SEQ ID NO: 2833 - protein, 913 aa, Artificial Sequence
  Synthetic Polypeptide
MALPVTALLLPLALLLHAARPDQSVLTQPPSVSVAPGKTARIPCEGNYIGSSNVHWYQQKPGQAPVLVIHFDSDRPSGIPDRFSGSNSGNMATLTISRVEAGDEADYYCQVWENHGWVFGGGTKLTVLSGGGGSGGGGSGGGGSEVQLVETGGGLVQPGESLRLSCAASGFTFSDYEMNWVRQAPGKGLEWVSYISSSGSTIYYADSVKGRFTIYRDNAKNSLYLQMNSLRAEDTALYYCARAWGVGPPDYWGQGTLVTVSSTREQKLISEEDLAKPTTTPAPRPPTPAPTIASQPLSLRPEACRPAAGGAVHTRGLDFACDIYIWAPLAGTCGVLLLSLVITLYCGRARVKFSRSADAPAYQQGQNQLYNELNLGRREEYDVLDKRRGRDPEMGGKPRRKNPQEGLYNELQKDKMAEAYSEIGMKGERRRGKGHDGLYQGLSTATKDTYDALHMQALPPRSRGSGATNFSLLKQAGDVEENPGPGIHMATYEVLCEVARKLGTDDREVVLFLLNVFIPQPTLAQLIGALRALKEEGRLTFPLLAECLFRAGRRDLLRDLLHLDPRFLERHLAGTMSYFSPYQLTVLHVDGELCARDIRSLIFLSKDTIGSRSTPQTFLHWVYCMENLDLLGPTDVDALMSMLRSLSRVDLQRQVQTLMGLHLSGPSHSQHYRHTPLETDFYDYKDDDDKTSGSGEGRGSLLTCGDVEENPGPHMTEYKPTVRLATRDDVPRAVRTLAAAFADYPATRHTVDPDRHIERVTELQELFLTRVGLDIGKVWVADDGAAVAVWTTPESVEAGAVFAEIGPRMAELSGSRLAAQQQMEGLLAPHRPKEPAWFLATVGVSPDHQGKGLGSAVVLPGVEAAERAGVPAFLETSAPRNLPFYERLGFTVTADVEVPEGPRTWCMTRKPGA

SEQ ID NO: 2834 - protein, 921 aa, Artificial Sequence
  Synthetic Polypeptide
MALPVTALLLPLALLLHAARPDIQMTQSPSSLSASVGDTVTITCQANGYLNWYQQRRGKAPKLLIYDGSKLERGVPSRFSGRRWGQEYNLTINNLQPEDIATYFCQVYEFVVPGTRLDLKRTVAAPGGGGSGGGGSGGGGSQVQLLQSGAAVTKPGASVRVSCEASGYNIRDYFIHWWRQAPGQGLQWVGWINPKTGQPNNPRQFQGRVSLTRHASWDFDTFSFYMDLKALRSDDTAVYFCARQRSDYWDFDVWGSGTQVTVSSASTKGPTREQKLISEEDLAKPTTTPAPRPPTPAPTIASQPLSLRPEACRPAAGGAVHTRGLDFACDIYIWAPLAGTCGVLLLSLVITLYCGRARVKFSRSADAPAYQQGQNQLYNELNLGRREEYDVLDKRRGRDPEMGGKPRRKNPQEGLYNELQKDKMAEAYSEIGMKGERRRGKGHDGLYQGLSTATKDTYDALHMQALPPRSRGSGATNFSLLKQAGDVEENPGPGIHMATYEVLCEVARKLGTDDREVVLFLLNVFIPQPTLAQLIGALRALKEEGRLTFPLLAECLFRAGRRDLLRDLLHLDPRFLERHLAGTMSYFSPYQLTVLHVDGELCARDIRSLIFLSKDTIGSRSTPQTFLHWVYCMENLDLLGPTDVDALMSMLRSLSRVDLQRQVQTLMGLHLSGPSHSQHYRHTPLETDFYDYKDDDDKTSGSGEGRGSLLTCGDVEENPGPHMTEYKPTVRLATRDDVPRAVRTLAAAFADYPATRHTVDPDRHIERVTELQELFLTRVGLDIGKVWVADDGAAVAVWTTPESVEAGAVFAEIGPRMAELSGSRLAAQQQMEGLLAPHRPKEPAWFLATVGVSPDHQGKGLGSAVVLPGVEAAERAGVPAFLETSAPRNLPFYERLGFTVTADVEVPEGPRTWCMTRKPGA

SEQ ID NO: 2835 - protein, 927 aa, Artificial Sequence
  Synthetic Polypeptide
MALPVTALLLPLALLLHAARPQSALTQPPSASGSPGQSITISCTGTSNNFVSWYQQHAGKAPKLVIYDVNKRPSGVPDRFSGSKSGNTASLTVSGLQTDDEAVYYCGSLVGNWDVIFGGGTKLTVLGGGGSGGGGSGGGGSQPQLQESGPTLVEASETLSLTCAVSGDSTAACNSFWGWVRQPPGKGLEWVGSLSHCASYWNRGWTYHNPSLKSRLTLALDTPKNLVFLKLNSVTAADTATYYCARFGGEVLRYTDWPKPAWVDLWGRGTLVTVSSTREQKLISEEDLAKPTTTPAPRPPTPAPTIASQPLSLRPEACRPAAGGAVHTRGLDFACDIYIWAPLAGTCGVLLLSLVITLYCGRARVKFSRSADAPAYQQGQNQLYNELNLGRREEYDVLDKRRGRDPEMGGKPRRKNPQEGLYNELQKDKMAEAYSEIGMKGERRRGKGHDGLYQGLSTATKDTYDALHMQALPPRSRGSGATNFSLLKQAGDVEENPGPGIHMATYEVLCEVARKLGTDDREVVLFLLNVFIPQPTLAQLIGALRALKEEGRLTFPLLAECLFRAGRRDLLRDLLHLDPRFLERHLAGTMSYFSPYQLTVLHVDGELCARDIRSLIFLSKDTIGSRSTPQTFLHWVYCMENLDLLGPTDVDALMSMLRSLSRVDLQRQVQTLMGLHLSGPSHSQHYRHTPLETDFYDYKDDDDKTSGSGEGRGSLLTCGDVEENPGPHMTEYKPTVRLATRDDVPRAVRTLAAAFADYPATRHTVDPDRHIERVTELQELFLTRVGLDIGKVWVADDGAAVAVWTTPESVEAGAVFAEIGPRMAELSGSRLAAQQQMEGLLAPHRPKEPAWFLATVGVSPDHQGKGLGSAVVLPGVEAAERAGVPAFLETSAPRNLPFYERLGFTVTADVEVPEGPRTWCMTRKPGA

SEQ ID NO: 2836 - protein, 912 aa, Artificial Sequence
  Synthetic Polypeptide
MALPVTALLLPLALLLHAARPEIVLTQSPGTLSLSPGETAIISCRTSQYGSLAWYQQRPGQAPRLVIYSGSTRAAGIPDRFSGSRWGPDYNLTISNLESGDFGVYYCQQYEFFGQGTKVQVDIKRGGGGSGGGGSGGGGSQVQLVQSGGQMKKPGESMRISCRASGYEFIDCTLNWIRLAPGKRPEWMGWLKPRGGAVNYARPLQGRVTMTRDVYSDTAFLELRSLTVDDTAVYFCTRGKNCDYNWDFEHWGRGTPVIVSSTREQKLISEEDLAKPTTTPAPRPPTPAPTIASQPLSLRPEACRPAAGGAVHTRGLDFACDIYIWAPLAGTCGVLLLSLVITLYCGRARVKFSRSADAPAYQQGQNQLYNELNLGRREEYDVLDKRRGRDPEMGGKPRRKNPQEGLYNELQKDKMAEAYSEIGMKGERRRGKGHDGLYQGLSTATKDTYDALHMQALPPRSRGSGATNFSLLKQAGDVEENPGPGIHMATYEVLCEVARKLGTDDREVVLFLLNVFIPQPTLAQLIGALRALKEEGRLTFPLLAECLFRAGRRDLLRDLLHLDPRFLERHLAGTMSYFSPYQLTVLHVDGELCARDIRSLIFLSKDTIGSRSTPQTFLHWVYCMENLDLLGPTDVDALMSMLRSLSRVDLQRQVQTLMGLHLSGPSHSQHYRHTPLETDFYDYKDDDDKTSGSGEGRGSLLTCGDVEENPGPHMTEYKPTVRLATRDDVPRAVRTLAAAFADYPATRHTVDPDRHIERVTELQELFLTRVGLDIGKVWVADDGAAVAVWTTPESVEAGAVFAEIGPRMAELSGSRLAAQQQMEGLLAPHRPKEPAWFLATVGVSPDHQGKGLGSAVVLPGVEAAERAGVPAFLETSAPRNLPFYERLGFTVTADVEVPEGPRTWCMTRKPGA

SEQ ID NO: 2837 - protein, 922 aa, Artificial Sequence
  Synthetic Polypeptide
MALPVTALLLPLALLLHAARPELVLTQSPGTLSLSAGERATLSCRASQSVSSGSLAWYQQKPGQAPRLLIYGASTRATGIPDRFSGSGSGTDFTLTIGRLEPEDLAVYYCQQYGTSPYTFGQGTKLEIGGGGSGGGGSGGGGSLEQSGAEVKKPGSSVQVSCKASGGTFSMYGFNWVRQAPGHGLEWMGGIIPIFGTSNYAQKFRGRVTFTADQATSTAYMELTNLRSDDTAVYYCARDFGPDWEDGDSYDGSGRGFFDFWGQGTLVTVSSTREQKLISEEDLAKPTTTPAPRPPTPAPTIASQPLSLRPEACRPAAGGAVHTRGLDFACDIYIWAPLAGTCGVLLLSLVITLYCGRARVKFSRSADAPAYQQGQNQLYNELNLGRREEYDVLDKRRGRDPEMGGKPRRKNPQEGLYNELQKDKMAEAYSEIGMKGERRRGKGHDGLYQGLSTATKDTYDALHMQALPPRSRGSGATNFSLLKQAGDVEENPGPGIHMATYEVLCEVARKLGTDDREVVLFLLNVFIPQPTLAQLIGALRALKEEGRLTFPLLAECLFRAGRRDLLRDLLHLDPRFLERHLAGTMSYFSPYQLTVLHVDGELCARDIRSLIFLSKDTIGSRSTPQTFLHWVYCMENLDLLGPTDVDALMSMLRSLSRVDLQRQVQTLMGLHLSGPSHSQHYRHTPLETDFYDYKDDDDKTSGSGEGRGSLLTCGDVEENPGPHMTEYKPTVRLATRDDVPRAVRTLAAAFADYPATRHTVDPDRHIERVTELQELFLTRVGLDIGKVWVADDGAAVAVWTTPESVEAGAVFAEIGPRMAELSGSRLAAQQQMEGLLAPHRPKEPAWFLATVGVSPDHQGKGLGSAVVLPGVEAAERAGVPAFLETSAPRNLPFYERLGFTVTADVEVPEGPRTWCMTRKPGA

SEQ ID NO: 2838 - protein, 918 aa, Artificial Sequence
  Synthetic Polypeptide
MALPVTALLLPLALLLHAARPDVVMTQSPSSLSASVGDRVTITCQSSLDISHYLNWYQQKPGKAPKLLIYDASNLETGVPSRFSGSGSGTHFTFTISSLQPEDFATYYCQQYDNLPLTFGGGTKLEIKRGGGGSGGGGSGGGGSQVQLVQSGGGVVQPGGSLRVSCAASGVTLSDYGMHWVRQAPGKGLEWVAFIRNDGSDKYYADSVKGRFTISRDNSEKTVSLQMSSLRAEDTAVYYCAKNGESGPLDYWYLDLWGRGTLVTVSSTREQKLISEEDLAKPTTTPAPRPPTPAPTIASQPLSLRPEACRPAAGGAVHTRGLDFACDIYIWAPLAGTCGVLLLSLVITLYCGRARVKFSRSADAPAYQQGQNQLYNELNLGRREEYDVLDKRRGRDPEMGGKPRRKNPQEGLYNELQKDKMAEAYSEIGMKGERRRGKGHDGLYQGLSTATKDTYDALHMQALPPRSRGSGATNFSLLKQAGDVEENPGPGIHMATYEVLCEVARKLGTDDREVVLFLLNVFIPQPTLAQLIGALRALKEEGRLTFPLLAECLFRAGRRDLLRDLLHLDPRFLERHLAGTMSYFSPYQLTVLHVDGELCARDIRSLIFLSKDTIGSRSTPQTFLHWVYCMENLDLLGPTDVDALMSMLRSLSRVDLQRQVQTLMGLHLSGPSHSQHYRHTPLETDFYDYKDDDDKTSGSGEGRGSLLTCGDVEENPGPHMTEYKPTVRLATRDDVPRAVRTLAAAFADYPATRHTVDPDRHIERVTELQELFLTRVGLDIGKVWVADDGAAVAVWTTPESVEAGAVFAEIGPRMAELSGSRLAAQQQMEGLLAPHRPKEPAWFLATVGVSPDHQGKGLGSAVVLPGVEAAERAGVPAFLETSAPRNLPFYERLGFTVTADVEVPEGPRTWCMTRKPGA

SEQ ID NO: 2839 - protein, 918 aa, Artificial Sequence
  Synthetic Polypeptide
MALPVTALLLPLALLLHAARPDDIVMTQSQDSMATSVGERVTVNCKASQNVDTNVAWYQQKPGQSPEPLLFSASYRYTGVPDRFSGSGSGTDFTLTISSVQAEDVAEYFCQQYNSYPLTFGQGTKLEIKRGGGGSGGGGSGGGGSEVQVEVSGGGLVQPGGSMRLSCAVSGFTFSNYWMNWVRQSPEKGLEWIAEIRLKSNNFARYYAESVKGRFTISRDNSKNSLYLQMISLRAEDTAIYYCTSYGNYVGHYFDHWGQGTLLTVSSTREQKLISEEDLAKPTTTPAPRPPTPAPTIASQPLSLRPEACRPAAGGAVHTRGLDFACDIYIWAPLAGTCGVLLLSLVITLYCGRARVKFSRSADAPAYQQGQNQLYNELNLGRREEYDVLDKRRGRDPEMGGKPRRKNPQEGLYNELQKDKMAEAYSEIGMKGERRRGKGHDGLYQGLSTATKDTYDALHMQALPPRSRGSGATNFSLLKQAGDVEENPGPGIHMATYEVLCEVARKLGTDDREVVLFLLNVFIPQPTLAQLIGALRALKEEGRLTFPLLAECLFRAGRRDLLRDLLHLDPRFLERHLAGTMSYFSPYQLTVLHVDGELCARDIRSLIFLSKDTIGSRSTPQTFLHWVYCMENLDLLGPTDVDALMSMLRSLSRVDLQRQVQTLMGLHLSGPSHSQHYRHTPLETDFYDYKDDDDKTSGSGEGRGSLLTCGDVEENPGPHMTEYKPTVRLATRDDVPRAVRTLAAAFADYPATRHTVDPDRHIERVTELQELFLTRVGLDIGKVWVADDGAAVAVWTTPESVEAGAVFAEIGPRMAELSGSRLAAQQQMEGLLAPHRPKEPAWFLATVGVSPDHQGKGLGSAVVLPGVEAAERAGVPAFLETSAPRNLPFYERLGFTVTADVEVPEGPRTWCMTRKPGA

SEQ ID NO: 2840 - protein, 922 aa, Artificial Sequence
  Synthetic Polypeptide
MALPVTALLLPLALLLHAARPSYELTQPPSVSGTPGQRVAISCSGSSSNIGTRMVTWYQHVPGTAPKLLIFNNNQRPSGVPDRFSASKSGTSASLAIIGLQSDDEADYYCATWDDNVKSYVFGTGTKVTVLGSRGGGGSGGGGSGGGGSLEMAQVQLQQWGAGLLKPSETLSLTCAVYGGSFSGYYWSWIRQPPGKGLEWIGEINHSGSTNYNPSLKSRVTISVDTSKNQFSLKLSSVTAADTAVYYCARAPQSWYVGDVWGQGTLVTVSSTREQKLISEEDLAKPTTTPAPRPPTPAPTIASQPLSLRPEACRPAAGGAVHTRGLDFACDIYIWAPLAGTCGVLLLSLVITLYCGRARVKFSRSADAPAYQQGQNQLYNELNLGRREEYDVLDKRRGRDPEMGGKPRRKNPQEGLYNELQKDKMAEAYSEIGMKGERRRGKGHDGLYQGLSTATKDTYDALHMQALPPRSRGSGATNFSLLKQAGDVEENPGPGIHMATYEVLCEVARKLGTDDREVVLFLLNVFIPQPTLAQLIGALRALKEEGRLTFPLLAECLFRAGRRDLLRDLLHLDPRFLERHLAGTMSYFSPYQLTVLHVDGELCARDIRSLIFLSKDTIGSRSTPQTFLHWVYCMENLDLLGPTDVDALMSMLRSLSRVDLQRQVQTLMGLHLSGPSHSQHYRHTPLETDFYDYKDDDDKTSGSGEGRGSLLTCGDVEENPGPHMTEYKPTVRLATRDDVPRAVRTLAAAFADYPATRHTVDPDRHIERVTELQELFLTRVGLDIGKVWVADDGAAVAVWTTPESVEAGAVFAEIGPRMAELSGSRLAAQQQMEGLLAPHRPKEPAWFLATVGVSPDHQGKGLGSAVVLPGVEAAERAGVPAFLETSAPRNLPFYERLGFTVTADVEVPEGPRTWCMTRKPGA

SEQ ID NO: 2841 - protein, 919 aa, Artificial Sequence
  Synthetic Polypeptide
MALPVTALLLPLALLLHAARPQSVLTQPPSLSVAPGKTASITCGGNNIGMKSVHWYQQRPGQAPVLVIYYDSDRPSGIPGRFSGSNSGNTATLTISRVEAGDEADYYCQVWDTTGDHPGYVFGTGTKVTVLGGGGSGGGGSGGGGSQVQLVQSGAEVKKPGSSVKVSCKASGGTFSSYAISWVRQAPGQGLEWMGGIIPIFGTANYAQKFQGRVTITADESTSTAYMELSSLRSEDTAVYYCARGVYGYSGSAPYDEWGQGTLVTVSSTREQKLISEEDLAKPTTTPAPRPPTPAPTIASQPLSLRPEACRPAAGGAVHTRGLDFACDIYIWAPLAGTCGVLLLSLVITLYCGRARVKFSRSADAPAYQQGQNQLYNELNLGRREEYDVLDKRRGRDPEMGGKPRRKNPQEGLYNELQKDKMAEAYSEIGMKGERRRGKGHDGLYQGLSTATKDTYDALHMQALPPRSRGSGATNFSLLKQAGDVEENPGPGIHMATYEVLCEVARKLGTDDREVVLFLLNVFIPQPTLAQLIGALRALKEEGRLTFPLLAECLFRAGRRDLLRDLLHLDPRFLERHLAGTMSYFSPYQLTVLHVDGELCARDIRSLIFLSKDTIGSRSTPQTFLHWVYCMENLDLLGPTDVDALMSMLRSLSRVDLQRQVQTLMGLHLSGPSHSQHYRHTPLETDFYDYKDDDDKTSGSGEGRGSLLTCGDVEENPGPHMTEYKPTVRLATRDDVPRAVRTLAAAFADYPATRHTVDPDRHIERVTELQELFLTRVGLDIGKVWVADDGAAVAVWTTPESVEAGAVFAEIGPRMAELSGSRLAAQQQMEGLLAPHRPKEPAWFLATVGVSPDHQGKGLGSAVVLPGVEAAERAGVPAFLETSAPRNLPFYERLGFTVTADVEVPEGPRTWCMTRKPGA

SEQ ID NO: 2842 - protein, 925 aa, Artificial Sequence
  Synthetic Polypeptide
MALPVTALLLPLALLLHAARPDEIVLTQSPLSLPVTPGEPASISCRSSQSLLHSNGYNYLDWYLQKPGQSPQLLIYLGSNRASGVPDRFSGSGSGTDFTLKISRVEAEDVGVYYCMQALQTPRTFGQGTKVEIKRGGGGSGGGGSGGGGSQVQLVQSGGGVVQPGRSLRLSCAASGFTFSSYGMHWVRQAPGKGLEWVAVISYDGSNKYYADSVKGRFTISRDNSKNTLYLQMNSLRAEDTAVYYCARDFDYGDSYYYYGMDVWGQGTTVTVSSTREQKLISEEDLAKPTTTPAPRPPTPAPTIASQPLSLRPEACRPAAGGAVHTRGLDFACDIYIWAPLAGTCGVLLLSLVITLYCGRARVKFSRSADAPAYQQGQNQLYNELNLGRREEYDVLDKRRGRDPEMGGKPRRKNPQEGLYNELQKDKMAEAYSEIGMKGERRRGKGHDGLYQGLSTATKDTYDALHMQALPPRSRGSGATNFSLLKQAGDVEENPGPGIHMATYEVLCEVARKLGTDDREVVLFLLNVFIPQPTLAQLIGALRALKEEGRLTFPLLAECLFRAGRRDLLRDLLHLDPRFLERHLAGTMSYFSPYQLTVLHVDGELCARDIRSLIFLSKDTIGSRSTPQTFLHWVYCMENLDLLGPTDVDALMSMLRSLSRVDLQRQVQTLMGLHLSGPSHSQHYRHTPLETDFYDYKDDDDKTSGSGEGRGSLLTCGDVEENPGPHMTEYKPTVRLATRDDVPRAVRTLAAAFADYPATRHTVDPDRHIERVTELQELFLTRVGLDIGKVWVADDGAAVAVWTTPESVEAGAVFAEIGPRMAELSGSRLAAQQQMEGLLAPHRPKEPAWFLATVGVSPDHQGKGLGSAVVLPGVEAAERAGVPAFLETSAPRNLPFYERLGFTVTADVEVPEGPRTWCMTRKPGA

SEQ ID NO: 2843 - protein, 919 aa, Artificial Sequence
  Synthetic Polypeptide
MALPVTALLLPLALLLHAARPDEIVLTQSPATLSLSPGERATLSCRASQSVGSYLAWYQQKPGAPRLLIYDASHRATGIPARFSGSGSGTDFTLTISSLEPEDFAVYYCQQRSNWPPMYTFGQGTKLEIKRGGGGSGGGGSGGGGSEVQLVQSGAEVSVKVSCKASGGKKPGSTFSSYTISWVRQAPGQGLEWMGGIIPIFGTANYAQKFQGRVTITADKSTSTAYMELSSLRSEDTAVYYCAGDTDSSGYYGAVDYWGQGTLVTVSSTREQKLISEEDLAKPTTTPAPRPPTPAPTIASQPLSLRPEACRPAAGGAVHTRGLDFACDIYIWAPLAGTCGVLLLSLVITLYCGRARVKFSRSADAPAYQQGQNQLYNELNLGRREEYDVLDKRRGRDPEMGGKPRRKNPQEGLYNELQKDKMAEAYSEIGMKGERRRGKGHDGLYQGLSTATKDTYDALHMQALPPRSRGSGATNFSLLKQAGDVEENPGPGIHMATYEVLCEVARKLGTDDREVVLFLLNVFIPQPTLAQLIGALRALKEEGRLTFPLLAECLFRAGRRDLLRDLLHLDPRFLERHLAGTMSYFSPYQLTVLHVDGELCARDIRSLIFLSKDTIGSRSTPQTFLHWVYCMENLDLLGPTDVDALMSMLRSLSRVDLQRQVQTLMGLHLSGPSHSQHYRHTPLETDFYDYKDDDDKTSGSGEGRGSLLTCGDVEENPGPHMTEYKPTVRLATRDDVPRAVRTLAAAFADYPATRHTVDPDRHIERVTELQELFLTRVGLDIGKVWVADDGAAVAVWTTPESVEAGAVFAEIGPRMAELSGSRLAAQQQMEGLLAPHRPKEPAWFLATVGVSPDHQGKGLGSAVVLPGVEAAERAGVPAFLETSAPRNLPFYERLGFTVTADVEVPEGPRTWCMTRKPGA

SEQ ID NO: 2844 - protein, 902 aa, Artificial Sequence
  Synthetic Polypeptide
MALPVTALLLPLALLLHAARPDIQMTQSPSSLSASVGDRVTITCQASQDINNYLNWYQQKPGKAPKLLIYDASNLQTGVPSRFSGSGSGTDFTFTIEDIATYYCQQYTFGPGTKVDIKGGGGSGGGGSGGGGSEVQLLESGGGLVQPGGSLRLSCAASGFTFSWYSMTWVRQAPGKGLEWVSSIVPWGDFTQYADSVKGRFTISRDNSKNTLYLQMNSLRAEDTAVYYCAKGPGWGSFDLWGRGTLVTVSSTREQKLISEEDLAKPTTTPAPRPPTPAPTIASQPLSLRPEACRPAAGGAVHTRGLDFACDIYIWAPLAGTCGVLLLSLVITLYCGRARVKFSRSADAPAYQQGQNQLYNELNLGRREEYDVLDKRRGRDPEMGGKPRRKNPQEGLYNELQKDKMAEAYSEIGMKGERRRGKGHDGLYQGLSTATKDTYDALHMQALPPRSRGSGATNFSLLKQAGDVEENPGPGIHMATYEVLCEVARKLGTDDREVVLFLLNVFIPQPTLAQLIGALRALKEEGRLTFPLLAECLFRAGRRDLLRDLLHLDPRFLERHLAGTMSYFSPYQLTVLHVDGELCARDIRSLIFLSKDTIGSRSTPQTFLHWVYCMENLDLLGPTDVDALMSMLRSLSRVDLQRQVQTLMGLHLSGPSHSQHYRHTPLETDFYDYKDDDDKTSGSGEGRGSLLTCGDVEENPGPHMTEYKPTVRLATRDDVPRAVRTLAAAFADYPATRHTVDPDRHIERVTELQELFLTRVGLDIGKVWVADDGAAVAVWTTPESVEAGAVFAEIGPRMAELSGSRLAAQQQMEGLLAPHRPKEPAWFLATVGVSPDHQGKGLGSAVVLPGVEAAERAGVPAFLETSAPRNLPFYERLGFTVTADVEVPEGPRTWCMTRKPGA

SEQ ID NO: 2845 - protein, 791 aa, Artificial Sequence
  Synthetic Polypeptide
MDWIWRILFLVGAATGAHSEVQLVESGGGLVQPGGSLRLSCAASGSVFKINVMAWYRQAPGKGRELVAGIISGGSTSYADSVKGRFTISRDNAKNTLYLQMNSLRPEDTAVYYCAFITTESDYDLGRRYWGQGTLVTVSSTREQKLISEEDLAKPTTTPAPRPPTPAPTIASQPLSLRPEACRPAAGGAVHTRGLDFACDIYIWAPLAGTCGVLLLSLVITLYCGRARVKFSRSADAPAYQQGQNQLYNELNLGRREEYDVLDKRRGRDPEMGGKPRRKNPQEGLYNELQKDKMAEAYSEIGMKGERRRGKGHDGLYQGLSTATKDTYDALHMQALPPRSRGSGATNFSLLKQAGDVEENPGPGIHMATYEVLCEVARKLGTDDREVVLFLLNVFIPQPTLAQLIGALRALKEEGRLTFPLLAECLFRAGRRDLLRDLLHLDPRFLERHLAGTMSYFSPYQLTVLHVDGELCARDIRSLIFLSKDTIGSRSTPQTFLHWVYCMENLDLLGPTDVDALMSMLRSLSRVDLQRQVQTLMGLHLSGPSHSQHYRHTPLETDFYDYKDDDDKTSGSGEGRGSLLTCGDVEENPGPHMTEYKPTVRLATRDDVPRAVRTLAAAFADYPATRHTVDPDRHIERVTELQELFLTRVGLDIGKVWVADDGAAVAVWTTPESVEAGAVFAEIGPRMAELSGSRLAAQQQMEGLLAPHRPKEPAWFLATVGVSPDHQGKGLGSAVVLPGVEAAERAGVPAFLETSAPRNLPFYERLGFTVTADVEVPEGPRTWCMTRKPGA

SEQ ID NO: 2846 - protein, 912 aa, Artificial Sequence
  Synthetic Polypeptide
MALPVTALLLPLALLLHAARPDIQMTQSPSSLSASVGDRVTITCTASLSVSSTYLHWYQQKPGSSPKLWIYSTSNLASGVPSRFSGSGSGTSYTLTISSLQPEDFATYYCHQYHRSPLTFGGGTKVEIKRGGGGSGGGGSGGGGSEVQLVESGGGLVQPGGSLRLSCAASGFSLTKYGVHWVRQAPGKGLEWVGVKWAGGSTDYNSALMSRFTISKDNAKNSLYLQMNSLRAEDTAVYYCARDHRDAMDYWGQGTLVTVSSTREQKLISEEDLAKPTTTPAPRPPTPAPTIASQPLSLRPEACRPAAGGAVHTRGLDFACDIYIWAPLAGTCGVLLLSLVITLYCGRARVKFSRSADAPAYQQGQNQLYNELNLGRREEYDVLDKRRGRDPEMGGKPRRKNPQEGLYNELQKDKMAEAYSEIGMKGERRRGKGHDGLYQGLSTATKDTYDALHMQALPPRSRGSGATNFSLLKQAGDVEENPGPGIHMATYEVLCEVARKLGTDDREVVLFLLNVFIPQPTLAQLIGALRALKEEGRLTFPLLAECLFRAGRRDLLRDLLHLDPRFLERHLAGTMSYFSPYQLTVLHVDGELCARDIRSLIFLSKDTIGSRSTPQTFLHWVYCMENLDLLGPTDVDALMSMLRSLSRVDLQRQVQTLMGLHLSGPSHSQHYRHTPLETDFYDYKDDDDKTSGSGEGRGSLLTCGDVEENPGPHMTEYKPTVRLATRDDVPRAVRTLAAAFADYPATRHTVDPDRHIERVTELQELFLTRVGLDIGKVWVADDGAAVAVWTTPESVEAGAVFAEIGPRMAELSGSRLAAQQQMEGLLAPHRPKEPAWFLATVGVSPDHQGKGLGSAVVLPGVEAAERAGVPAFLETSAPRNLPFYERLGFTVTADVEVPEGPRTWCMTRKPGA

SEQ ID NO: 2847 - protein, 916 aa, Artificial Sequence
  Synthetic Polypeptide
MALPVTALLLPLALLLHAARPDIQMTQSPSSLSASVGDRVTITCKASQDVGTAVAWYQQKPGKAPKLLIYSASYRSTGVPSRFSGSGSGTDFTLTISSLQPEDFATYYCQHHYSAPWTFGGGTKVEIKGGGGSGGGGSGGGGSEVQLVESGGGLVQPGGSLRLSCAASGFTFSRNGMSWVRQAPGKGLEWVATVSSGGSYIYYADSVKGRFTISRDNAKNSLYLQMNSLRAEDTAVYYCARQGTTALATRFFDVWGQGTLVTVSSTREQKLISEEDLAKPTTTPAPRPPTPAPTIASQPLSLRPEACRPAAGGAVHTRGLDFACDIYIWAPLAGTCGVLLLSLVITLYCGRARVKFSRSADAPAYQQGQNQLYNELNLGRREEYDVLDKRRGRDPEMGGKPRRKNPQEGLYNELQKDKMAEAYSEIGMKGERRRGKGHDGLYQGLSTATKDTYDALHMQALPPRSRGSGATNFSLLKQAGDVEENPGPGIHMATYEVLCEVARKLGTDDREVVLFLLNVFIPQPTLAQLIGALRALKEEGRLTFPLLAECLFRAGRRDLLRDLLHLDPRFLERHLAGTMSYFSPYQLTVLHVDGELCARDIRSLIFLSKDTIGSRSTPQTFLHWVYCMENLDLLGPTDVDALMSMLRSLSRVDLQRQVQTLMGLHLSGPSHSQHYRHTPLETDFYDYKDDDDKTSGSGEGRGSLLTCGDVEENPGPHMTEYKPTVRLATRDDVPRAVRTLAAAFADYPATRHTVDPDRHIERVTELQELFLTRVGLDIGKVWVADDGAAVAVWTTPESVEAGAVFAEIGPRMAELSGSRLAAQQQMEGLLAPHRPKEPAWFLATVGVSPDHQGKGLGSAVVLPGVEAAERAGVPAFLETSAPRNLPFYERLGFTVTADVEVPEGPRTWCMTRKPGA

SEQ ID NO: 2848 - protein, 922 aa, Artificial Sequence
  Synthetic Polypeptide
MALPVTALLLPLALLLHAARPDIVMTQSPSSLTMSVGQKVTMSCKSSHSLLNSRNQKNYLAWFQQKPGQSPKLLVYFASTRESGVPDRFIGSGSGTDFTLTISNVQAEDLADYFCQQHYTTLPTFGGGTKLEIKGGGGSGGGGSGGGGSQIQLVQSGPDLKKPGETVKISCKASGYTFTNTGMNWVKQAPGKGLKWMGWINTYTGEPTYADDFKGRFTFSLETSASTAYLQINNLKNEDTATYFCTRWGYGSSLYYAMDYWGQGTSVTVSSTREQKLISEEDLAKPTTTPAPRPPTPAPTIASQPLSLRPEACRPAAGGAVHTRGLDFACDIYIWAPLAGTCGVLLLSLVITLYCGRARVKFSRSADAPAYQQGQNQLYNELNLGRREEYDVLDKRRGRDPEMGGKPRRKNPQEGLYNELQKDKMAEAYSEIGMKGERRRGKGHDGLYQGLSTATKDTYDALHMQALPPRSRGSGATNFSLLKQAGDVEENPGPGIHMATYEVLCEVARKLGTDDREVVLFLLNVFIPQPTLAQLIGALRALKEEGRLTFPLLAECLFRAGRRDLLRDLLHLDPRFLERHLAGTMSYFSPYQLTVLHVDGELCARDIRSLIFLSKDTIGSRSTPQTFLHWVYCMENLDLLGPTDVDALMSMLRSLSRVDLQRQVQTLMGLHLSGPSHSQHYRHTPLETDFYDYKDDDDKTSGSGEGRGSLLTCGDVEENPGPHMTEYKPTVRLATRDDVPRAVRTLAAAFADYPATRHTVDPDRHIERVTELQELFLTRVGLDIGKVWVADDGAAVAVWTTPESVEAGAVFAEIGPRMAELSGSRLAAQQQMEGLLAPHRPKEPAWFLATVGVSPDHQGKGLGSAVVLPGVEAAERAGVPAFLETSAPRNLPFYERLGFTVTADVEVPEGPRTWCMTRKPGA

SEQ ID NO: 2849 - protein, 912 aa, Artificial Sequence
  Synthetic Polypeptide
MALPVTALLLPLALLLHAARPDIQMTQSPPSLSASVGGKVTITCKASQDIDRYMAWYQDKPGKGPKLLIHDTSTLQPGIPSRFSGSGSGRDYSFSISNLEPEDIATYYCLQYDNLWTFGGGTKLEIKRGGGGSGGGGSGGGGSQVQLVQSGAELVKPGASVKMSCKASGYIFTNYNIHWVKKSPGQGLEWIGAIYPGNGDAPYSQKFQDRATLTADTSSSTTYMELSSLTSEDSAVYYCVRANWDVAFAYWGQGTLVSVSSTREQKLISEEDLAKPTTTPAPRPPTPAPTIASQPLSLRPEACRPAAGGAVHTRGLDFACDIYIWAPLAGTCGVLLLSLVITLYCGRARVKFSRSADAPAYQQGQNQLYNELNLGRREEYDVLDKRRGRDPEMGGKPRRKNPQEGLYNELQKDKMAEAYSEIGMKGERRRGKGHDGLYQGLSTATKDTYDALHMQALPPRSRGSGATNFSLLKQAGDVEENPGPGIHMATYEVLCEVARKLGTDDREVVLFLLNVFIPQPTLAQLIGALRALKEEGRLTFPLLAECLFRAGRRDLLRDLLHLDPRFLERHLAGTMSYFSPYQLTVLHVDGELCARDIRSLIFLSKDTIGSRSTPQTFLHWVYCMENLDLLGPTDVDALMSMLRSLSRVDLQRQVQTLMGLHLSGPSHSQHYRHTPLETDFYDYKDDDDKTSGSGEGRGSLLTCGDVEENPGPHMTEYKPTVRLATRDDVPRAVRTLAAAFADYPATRHTVDPDRHIERVTELQELFLTRVGLDIGKVWVADDGAAVAVWTTPESVEAGAVFAEIGPRMAELSGSRLAAQQQMEGLLAPHRPKEPAWFLATVGVSPDHQGKGLGSAVVLPGVEAAERAGVPAFLETSAPRNLPFYERLGFTVTADVEVPEGPRTWCMTRKPGA

SEQ ID NO: 2850 - protein, 913 aa, Artificial Sequence
  Synthetic Polypeptide
MALPVTALLLPLALLLHAARPDIQMTQSPASLSASVGETVTITCRVSGNIHNYLAWYQQKQGKSPQLLVYNAKTLADGVPSRFSGSGSGTQYSLKINSLQPEDFGSYYCQHFWSNPYTFGGGTKLEIKGGGGSGGGGSGGGGSQVQLQQSGASVKVSCKASELVRPGTGYAFTNYLIEWVKQRPGQGLEWIGVINPGSGGTNYNEKFKGKATLTADKSSSTAYMQLSSLTSDDSAVYFCARYRSYDWYFDVWGAGTTVTVSSTREQKLISEEDLAKPTTTPAPRPPTPAPTIASQPLSLRPEACRPAAGGAVHTRGLDFACDIYIWAPLAGTCGVLLLSLVITLYCGRARVKFSRSADAPAYQQGQNQLYNELNLGRREEYDVLDKRRGRDPEMGGKPRRKNPQEGLYNELQKDKMAEAYSEIGMKGERRRGKGHDGLYQGLSTATKDTYDALHMQALPPRSRGSGATNFSLLKQAGDVEENPGPGIHMATYEVLCEVARKLGTDDREVVLFLLNVFIPQPTLAQLIGALRALKEEGRLTFPLLAECLFRAGRRDLLRDLLHLDPRFLERHLAGTMSYFSPYQLTVLHVDGELCARDIRSLIFLSKDTIGSRSTPQTFLHWVYCMENLDLLGPTDVDALMSMLRSLSRVDLQRQVQTLMGLHLSGPSHSQHYRHTPLETDFYDYKDDDDKTSGSGEGRGSLLTCGDVEENPGPHMTEYKPTVRLATRDDVPRAVRTLAAAFADYPATRHTVDPDRHIERVTELQELFLTRVGLDIGKVWVADDGAAVAVWTTPESVEAGAVFAEIGPRMAELSGSRLAAQQQMEGLLAPHRPKEPAWFLATVGVSPDHQGKGLGSAVVLPGVEAAERAGVPAFLETSAPRNLPFYERLGFTVTADVEVPEGPRTWCMTRKPGA

SEQ ID NO: 2851 - protein, 918 aa, Artificial Sequence
  Synthetic Polypeptide
MALPVTALLLPLALLLHAARPDDIQMTQSPSSLSASVGDRVTITCRSSQRIVHSNGNTYLEWYQQTPGKAPKLLIYKVSNRFSGVPSRFSGSGSGTDYTPTISSLQPEDIATYYCFQGSHVPPTFGQGTKLQITGGGGSGGGGSGGGGSEVQLVESGGGVVQPGRSLRLSCSSSGPTFSDYYMYWVRQAPGKGLEWVAYMSNVGAITDYPDTVKGRPTISRDNSKNTLFLMDSLRPEDTGVYFCARGTRDGSWFAYWGQGTPVTVSSTREQKLISEEDLAKPTTTPAPRPPTPAPTIASQPLSLRPEACRPAAGGAVHTRGLDFACDIYIWAPLAGTCGVLLLSLVITLYCGRARVKFSRSADAPAYQQGQNQLYNELNLGRREEYDVLDKRRGRDPEMGGKPRRKNPQEGLYNELQKDKMAEAYSEIGMKGERRRGKGHDGLYQGLSTATKDTYDALHMQALPPRSRGSGATNFSLLKQAGDVEENPGPGIHMATYEVLCEVARKLGTDDREVVLFLLNVFIPQPTLAQLIGALRALKEEGRLTFPLLAECLFRAGRRDLLRDLLHLDPRFLERHLAGTMSYFSPYQLTVLHVDGELCARDIRSLIFLSKDTIGSRSTPQTFLHWVYCMENLDLLGPTDVDALMSMLRSLSRVDLQRQVQTLMGLHLSGPSHSQHYRHTPLETDFYDYKDDDDKTSGSGEGRGSLLTCGDVEENPGPHMTEYKPTVRLATRDDVPRAVRTLAAAFADYPATRHTVDPDRHIERVTELQELFLTRVGLDIGKVWVADDGAAVAVWTTPESVEAGAVFAEIGPRMAELSGSRLAAQQQMEGLLAPHRPKEPAWFLATVGVSPDHQGKGLGSAVVLPGVEAAERAGVPAFLETSAPRNLPFYERLGFTVTADVEVPEGPRTWCMTRKPGA

SEQ ID NO: 2852 - protein, 912 aa, Artificial Sequence
  Synthetic Polypeptide
MALPVTALLLPLALLLHAARPDIQMTQSFSSLSASVGDRVTITCRASQDISNYLNWYQQKPGKAPKLLIYYTSRLHSGVPSRFSGSGSGTDYTLTISSLQPEDFATYFCQQGNTLPWTFGGGTKLEIKRGGGGSGGGGSGGGGSEVQLVQSGGGLVQSGGSLRLSCRASGYTFTRYWMLWVRQRPGKGLEWVAEINPRNDRTNYNEKFKTRFTISVDRSKNTLYLQMDSLRAEDTAVYFCALGGGYAMDYWGQGTLVTVSSTREQKLISEEDLAKPTTTPAPRPPTPAPTIASQPLSLRPEACRPAAGGAVHTRGLDFACDIYIWAPLAGTCGVLLLSLVITLYCGRARVKFSRSADAPAYQQGQNQLYNELNLGRREEYDVLDKRRGRDPEMGGKPRRKNPQEGLYNELQKDKMAEAYSEIGMKGERRRGKGHDGLYQGLSTATKDTYDALHMQALPPRSRGSGATNFSLLKQAGDVEENPGPGIHMATYEVLCEVARKLGTDDREVVLFLLNVFIPQPTLAQLIGALRALKEEGRLTFPLLAECLFRAGRRDLLRDLLHLDPRFLERHLAGTMSYFSPYQLTVLHVDGELCARDIRSLIFLSKDTIGSRSTPQTFLHWVYCMENLDLLGPTDVDALMSMLRSLSRVDLQRQVQTLMGLHLSGPSHSQHYRHTPLETDFYDYKDDDDKTSGSGEGRGSLLTCGDVEENPGPHMTEYKPTVRLATRDDVPRAVRTLAAAFADYPATRHTVDPDRHIERVTELQELFLTRVGLDIGKVWVADDGAAVAVWTTPESVEAGAVFAEIGPRMAELSGSRLAAQQQMEGLLAPHRPKEPAWFLATVGVSPDHQGKGLGSAVVLPGVEAAERAGVPAFLETSAPRNLPFYERLGFTVTADVEVPEGPRTWCMTRKPGA

SEQ ID NO: 2853 - protein, 899 aa, Artificial Sequence
  Synthetic Polypeptide
MEMLQGLLLLLLLSMGGAWASREPLRPWCHPINAILAVEKEGCPVCITVNTTICAGYCPTMMRVLQAVLPPLPQVVCTYRDVRFESIRLPGCPRGVDPVVSFPVALSCRCGPCRRSTSDCGGPKDHPLTCDHPQLSGLLFLGGGGSGGGGSGGGGSAPDVQDCPECTLQENPFFSQPGAPILQCMGCCFSRAYPTPLRSKKTMLVQKNVTSESTCCVAKSYNRVTVMGGFKVENHTACHCSTCYYHKSTREQKLISEEDLAKPTTTPAPRPPTPAPTIASQPLSLRPEACRPAAGGAVHTRGLDFACDIYIWAPLAGTCGVLLLSLVITLYCGRARVKFSRSADAPAYQQGQNQLYNELNLGRREEYDVLDKRRGRDPEMGGKPRRKNPQEGLYNELQKDKMAEAYSEIGMKGERRRGKGHDGLYQGLSTATKDTYDALHMQALPPRSRGSGATNFSLLKQAGDVEENPGPGIHMATYEVLCEVARKLGTDDREVVLFLLNVFIPQPTLAQLIGALRALKEEGRLTFPLLAECLFRAGRRDLLRDLLHLDPRFLERHLAGTMSYFSPYQLTVLHVDGELCARDIRSLIFLSKDTIGSRSTPQTFLHWVYCMENLDLLGPTDVDALMSMLRSLSRVDLQRQVQTLMGLHLSGPSHSQHYRHTPLETDFYDYKDDDDKTSGSGEGRGSLLTCGDVEENPGPHMTEYKPTVRLATRDDVPRAVRTLAAAFADYPATRHTVDPDRHIERVTELQELFLTRVGLDIGKVWVADDGAAVAVWTTPESVEAGAVFAEIGPRMAELSGSRLAAQQQMEGLLAPHRPKEPAWFLATVGVSPDHQGKGLGSAVVLPGVEAAERAGVPAFLETSAPRNLPFYERLGFTVTADVEVPEGPRTWCMTRKPGA

SEQ ID NO: 2854 - protein, 913 aa, Artificial Sequence
  Synthetic Polypeptide
MALPVTALLLPLALLLHAARPDIQMTQSPASLSASVGETVTIICRASVNIYSYLAWYQQKQGKSPQLLVYNAKILAEGVPSRFSGSGSGTQFSLKINSLQPEDFGSYYCQHHYGTFTFGSGTKLEIKRGGGGSGGGGSGGGGSQVQLKESGPGLVAPSQSLSITCTISGFSLTSYGVHWVRQPPGKGLEWLVVIWSDGSTTYNSALKSRLSISKDNSKSQVFLKMNSLQTDDTAIYYCASHYGSTLAFASWGHGTLVTVSAATREQKLISEEDLAKPTTTPAPRPPTPAPTIASQPLSLRPEACRPAAGGAVHTRGLDFACDIYIWAPLAGTCGVLLLSLVITLYCGRARVKFSRSADAPAYQQGQNQLYNELNLGRREEYDVLDKRRGRDPEMGGKPRRKNPQEGLYNELQKDKMAEAYSEIGMKGERRRGKGHDGLYQGLSTATKDTYDALHMQALPPRSRGSGATNFSLLKQAGDVEENPGPGIHMATYEVLCEVARKLGTDDREVVLFLLNVFIPQPTLAQLIGALRALKEEGRLTFPLLAECLFRAGRRDLLRDLLHLDPRFLERHLAGTMSYFSPYQLTVLHVDGELCARDIRSLIFLSKDTIGSRSTPQTFLHWVYCMENLDLLGPTDVDALMSMLRSLSRVDLQRQVQTLMGLHLSGPSHSQHYRHTPLETDFYDYKDDDDKTSGSGEGRGSLLTCGDVEENPGPHMTEYKPTVRLATRDDVPRAVRTLAAAFADYPATRHTVDPDRHIERVTELQELFLTRVGLDIGKVWVADDGAAVAVWTTPESVEAGAVFAEIGPRMAELSGSRLAAQQQMEGLLAPHRPKEPAWFLATVGVSPDHQGKGLGSAVVLPGVEAAERAGVPAFLETSAPRNLPFYERLGFTVTADVEVPEGPRTWCMTRKPGA

SEQ ID NO: 2855 - protein, 921 aa, Artificial Sequence
  Synthetic Polypeptide
MALPVTALLLPLALLLHAARPDIVMTQSHKFMSTSVGDRVSVTCKASQNVGNNVAWYQQKPGQSPKVLIYSASYRYSGVPDRFTGSGSGTDFTLTISNVQSEDLAEYFCQQYNTYPFTFGSGTKLEIKGGGGSGGGGSGGGGSEVQLEESGGGLVQPGGSMKLSCVASGFTFSNYWMNWVRQSPEKGLEWVAEIRFKSHNYATHFAESVKGRFTISRDDSKSSVYLQMNNLRAEDTGIYYCTRRIGNSDYDWWYFDVWGAGTSVTVSSASTREQKLISEEDLAKPTTTPAPRPPTPAPTIASQPLSLRPEACRPAAGGAVHTRGLDFACDIYIWAPLAGTCGVLLLSLVITLYCGRARVKFSRSADAPAYQQGQNQLYNELNLGRREEYDVLDKRRGRDPEMGGKPRRKNPQEGLYNELQKDKMAEAYSEIGMKGERRRGKGHDGLYQGLSTATKDTYDALHMQALPPRSRGSGATNFSLLKQAGDVEENPGPGIHMATYEVLCEVARKLGTDDREVVLFLLNVFIPQPTLAQLIGALRALKEEGRLTFPLLAECLFRAGRRDLLRDLLHLDPRFLERHLAGTMSYFSPYQLTVLHVDGELCARDIRSLIFLSKDTIGSRSTPQTFLHWVYCMENLDLLGPTDVDALMSMLRSLSRVDLQRQVQTLMGLHLSGPSHSQHYRHTPLETDFYDYKDDDDKTSGSGEGRGSLLTCGDVEENPGPHMTEYKPTVRLATRDDVPRAVRTLAAAFADYPATRHTVDPDRHIERVTELQELFLTRVGLDIGKVWVADDGAAVAVWTTPESVEAGAVFAEIGPRMAELSGSRLAAQQQMEGLLAPHRPKEPAWFLATVGVSPDHQGKGLGSAVVLPGVEAAERAGVPAFLETSAPRNLPFYERLGFTVTADVEVPEGPRTWCMTRKPGA

SEQ ID NO: 2856 - protein, 917 aa, Artificial Sequence; identical to SEQ ID NO: 2741
  Synthetic Polypeptide

SEQ ID NO: 2857 - protein, 923 aa, Artificial Sequence
  Synthetic Polypeptide
MALPVTALLLPLALLLHAARPDQSVLTQPPSVSGAPGQRVTISCTGSSSNIGAGYDVHWYQQLPGTAPKLLIYGNSNRPSGVPDRFSGSKSGTSASLAITGLQAEDEADYYCQSYDNSLSSWVFGGGTKLTVLGQPKGGGGSGGGGSGGGGSEVQLQQSGAEVKKPGSSVKVSCKASGGTFSSYAISWVRQAPGQGLEWMGRIIPILGIANYAQKFQGRVTITADKSTSTAYMELSSLRSEDTAVYYCARDVGSGSYSLDYWGQGTLVTVSSTREQKLISEEDLAKPTTTPAPRPPTPAPTIASQPLSLRPEACRPAAGGAVHTRGLDFACDIYIWAPLAGTCGVLLLSLVITLYCGRARVKFSRSADAPAYQQGQNQLYNELNLGRREEYDVLDKRRGRDPEMGGKPRRKNPQEGLYNELQKDKMAEAYSEIGMKGERRRGKGHDGLYQGLSTATKDTYDALHMQALPPRSRGSGATNFSLLKQAGDVEENPGPGIHMATYEVLCEVARKLGTDDREVVLFLLNVFIPQPTLAQLIGALRALKEEGRLTFPLLAECLFRAGRRDLLRDLLHLDPRFLERHLAGTMSYFSPYQLTVLHVDGELCARDIRSLIFLSKDTIGSRSTPQTFLHWVYCMENLDLLGPTDVDALMSMLRSLSRVDLQRQVQTLMGLHLSGPSHSQHYRHTPLETDFYDYKDDDDKTSGSGEGRGSLLTCGDVEENPGPHMTEYKPTVRLATRDDVPRAVRTLAAAFADYPATRHTVDPDRHIERVTELQELFLTRVGLDIGKVWVADDGAAVAVWTTPESVEAGAVFAEIGPRMAELSGSRLAAQQQMEGLLAPHRPKEPAWFLATVGVSPDHQGKGLGSAVVLPGVEAAERAGVPAFLETSAPRNLPFYERLGFTVTADVEVPEGPRTWCMTRKPGA

SEQ ID NO: 2858 - protein, 920 aa, Artificial Sequence
  Synthetic Polypeptide
MALPVTALLLPLALLLHAARPDQSVVTQPPSVSAAPGRKVTISCSGSSSNIGSNYVSWYQQVPGTAPKLLIYEDDKRPSGIPDRFSGSKSGTSATLGITGLQTGDEADYFCATWDRTVNVVRFGGGTRLTVHSQPKGGGGSGGGGSGGGGSQLQLQESGPGLVKPSETLSLTCTVSGGSISSSSYYWGWIRQPPGKGLEWIGSIYYSGSTYYNPSLKSRVTISVDTSKNQFSLKLSSVTAADTAVYYCARHVGHELDYWGQGTLVTVSSTREQKLISEEDLAKPTTTPAPRPPTPAPTIASQPLSLRPEACRPAAGGAVHTRGLDFACDIYIWAPLAGTCGVLLLSLVITLYCGRARVKFSRSADAPAYQQGQNQLYNELNLGRREEYDVLDKRRGRDPEMGGKPRRKNPQEGLYNELQKDKMAEAYSEIGMKGERRRGKGHDGLYQGLSTATKDTYDALHMQALPPRSRGSGATNFSLLKQAGDVEENPGPGIHMATYEVLCEVARKLGTDDREVVLFLLNVFIPQPTLAQLIGALRALKEEGRLTFPLLAECLFRAGRRDLLRDLLHLDPRFLERHLAGTMSYFSPYQLTVLHVDGELCARDIRSLIFLSKDTIGSRSTPQTFLHWVYCMENLDLLGPTDVDALMSMLRSLSRVDLQRQVQTLMGLHLSGPSHSQHYRHTPLETDFYDYKDDDDKTSGSGEGRGSLLTCGDVEENPGPHMTEYKPTVRLATRDDVPRAVRTLAAAFADYPATRHTVDPDRHIERVTELQELFLTRVGLDIGKVWVADDGAAVAVWTTPESVEAGAVFAEIGPRMAELSGSRLAAQQQMEGLLAPHRPKEPAWFLATVGVSPDHQGKGLGSAVVLPGVEAAERAGVPAFLETSAPRNLPFYERLGFTVTADVEVPEGPRTWCMTRKPGA

SEQ ID NO: 2859 - protein, 914 aa, Artificial Sequence
  Synthetic Polypeptide
MALPVTALLLPLALLLHAARPDIQMTQSPSSLSASVGDRVTITCRASQSISSYLNWYQQKPGKAPKLLIYAASSLQSGVPSGFSGSGSGTDFTLTISSLQPEDFATYYCQQSYSTPLTFGGGTKVEIKRGGGGSGGGGSGGGGSQVQLQESGPGLVKPSETLSLTCTVSGGSVSSGSYYWSWIRQPPGKGLEWIGYIYYSGSTNYNPSLKSRVTISVDTSKNQFSLKLSSVTAADTAVYYCAREGKNGAFDIWGQGTMVTVSSTREQKLISEEDLAKPTTTPAPRPPTPAPTIASQPLSLRPEACRPAAGGAVHTRGLDFACDIYIWAPLAGTCGVLLLSLVITLYCGRARVKFSRSADAPAYQQGQNQLYNELNLGRREEYDVLDKRRGRDPEMGGKPRRKNPQEGLYNELQKDKMAEAYSEIGMKGERRRGKGHDGLYQGLSTATKDTYDALHMQALPPRSRGSGATNFSLLKQAGDVEENPGPGIHMATYEVLCEVARKLGTDDREVVLFLLNVFIPQPTLAQLIGALRALKEEGRLTFPLLAECLFRAGRRDLLRDLLHLDPRFLERHLAGTMSYFSPYQLTVLHVDGELCARDIRSLIFLSKDTIGSRSTPQTFLHWVYCMENLDLLGPTDVDALMSMLRSLSRVDLQRQVQTLMGLHLSGPSHSQHYRHTPLETDFYDYKDDDDKTSGSGEGRGSLLTCGDVEENPGPHMTEYKPTVRLATRDDVPRAVRTLAAAFADYPATRHTVDPDRHIERVTELQELFLTRVGLDIGKVWVADDGAAVAVWTTPESVEAGAVFAEIGPRMAELSGSRLAAQQQMEGLLAPHRPKEPAWFLATVGVSPDHQGKGLGSAVVLPGVEAAERAGVPAFLETSAPRNLPFYERLGFTVTADVEVPEGPRTWCMTRKPGA

SEQ ID NO: 2860 - protein, 800 aa, Artificial Sequence
  Synthetic Polypeptide
MALPVTALLLPLALLLHAARPDEFDVQLVESGGGLVQPGGSLRLSCAASGFILDYYAIGWFRQAPGKEREGVLCIDASDDITYYADSVKGRFTISRDNSKNTVYLQMNSLRPEDTAVYYCATPIGLSSSCLLEYDYDYWGQGTLVTVSSTREQKLISEEDLAKPTTTPAPRPPTPAPTIASQPLSLRPEACRPAAGGAVHTRGLDFACDIYIWAPLAGTCGVLLLSLVITLYCGRARVKFSRSADAPAYQQGQNQLYNELNLGRREEYDVLDKRRGRDPEMGGKPRRKNPQEGLYNELQKDKMAEAYSEIGMKGERRRGKGHDGLYQGLSTATKDTYDALHMQALPPRSRGSGATNFSLLKQAGDVEENPGPGIHMATYEVLCEVARKLGTDDREVVLFLLNVFIPQPTLAQLIGALRALKEEGRLTFPLLAECLFRAGRRDLLRDLLHLDPRFLERHLAGTMSYFSPYQLTVLHVDGELCARDIRSLIFLSKDTIGSRSTPQTFLHWVYCMENLDLLGPTDVDALMSMLRSLSRVDLQRQVQTLMGLHLSGPSHSQHYRHTPLETDFYDYKDDDDKTSGSGEGRGSLLTCGDVEENPGPHMTEYKPTVRLATRDDVPRAVRTLAAAFADYPATRHTVDPDRHIERVTELQELFLTRVGLDIGKVWVADDGAAVAVWTTPESVEAGAVFAEIGPRMAELSGSRLAAQQQMEGLLAPHRPKEPAWFLATVGVSPDHQGKGLGSAVVLPGVEAAERAGVPAFLETSAPRNLPFYERLGFTVTADVEVPEGPRTWCMTRKPGA

SEQ ID NO: 2861 - protein, 963 aa, Artificial Sequence
  Synthetic Polypeptide
MALPVTALLLPLALLLHAARPDEFDVQLVESGGGLVQPGGSLRLSCAASGFILDYYAIGWFRQAPGKEREGVLCIDASDDITYYADSVKGRFTISRDNSKNTVYLQMNSLRPEDTAVYYCATPIGLSSSCLLEYDYDYWGQGTLVTVSSLEGGSGSGGGGSGGGGSGSGGSGSGGSGSGGSGSGGSFEVQLVESGGGLVQPGGSLRLSCAASGRTYYLNAMGWFRQAPGKEREFVAAIDWSEGNKDYADSVKGRFTISRDNSKNTVYLQMNSLRPEDTAVYYCAADTPPWGPLIYIESYDSWGQGTLVTVSSTREQKLISEEDLAKPTTTPAPRPPTPAPTIASQPLSLRPEACRPAAGGAVHTRGLDFACDIYIWAPLAGTCGVLLLSLVITLYCGRARVKFSRSADAPAYQQGQNQLYNELNLGRREEYDVLDKRRGRDPEMGGKPRRKNPQEGLYNELQKDKMAEAYSEIGMKGERRRGKGHDGLYQGLSTATKDTYDALHMQALPPRSRGSGATNFSLLKQAGDVEENPGPGIHMATYEVLCEVARKLGTDDREVVLFLLNVFIPQPTLAQLIGALRALKEEGRLTFPLLAECLFRAGRRDLLRDLLHLDPRFLERHLAGTMSYFSPYQLTVLHVDGELCARDIRSLIFLSKDTIGSRSTPQTFLHWVYCMENLDLLGPTDVDALMSMLRSLSRVDLQRQVQTLMGLHLSGPSHSQHYRHTPLETDFYDYKDDDDKTSGSGEGRGSLLTCGDVEENPGPHMTEYKPTVRLATRDDVPRAVRTLAAAFADYPATRHTVDPDRHIERVTELQELFLTRVGLDIGKVWVADDGAAVAVWTTPESVEAGAVFAEIGPRMAELSGSRLAAQQQMEGLLAPHRPKEPAWFLATVGVSPDHQGKGLGSAVVLPGVEAAERAGVPAFLETSAPRNLPFYERLGFTVTADVEVPEGPRTWCMTRKPGA

SEQ ID NO: 2862 - protein, 914 aa, Artificial Sequence
  Synthetic Polypeptide
MALPVTALLLPLALLLHAARPDQIVLTQSPAIMSASPGEKVTISCSASSSVSYMYWYQQKPGSSPKPWIYRTSNLASGVPARFSGSGSGTSYSLTISNMEAEDAAAYYCQQYHSYPTTFGGGTKLEVKGGGGSGGGGSGGGGSEVQLVESGGGLVQPKGSLKLSCAASGFSFNTYAMNWVRQAPGKGLEWIAHIRSKSNNFATYYADSVKDRFSISRDASENILFLQMNNLKTEDTAMYYCVRQGGDFPMDYWGQGTSVTVSSTREQKLISEEDLAKPTTTPAPRPPTPAPTIASQPLSLRPEACRPAAGGAVHTRGLDFACDIYIWAPLAGTCGVLLLSLVITLYCGRARVKFSRSADAPAYQQGQNQLYNELNLGRREEYDVLDKRRGRDPEMGGKPRRKNPQEGLYNELQKDKMAEAYSEIGMKGERRRGKGHDGLYQGLSTATKDTYDALHMQALPPRSRGSGATNFSLLKQAGDVEENPGPGIHMATYEVLCEVARKLGTDDREVVLFLLNVFIPQPTLAQLIGALRALKEEGRLTFPLLAECLFRAGRRDLLRDLLHLDPRFLERHLAGTMSYFSPYQLTVLHVDGELCARDIRSLIFLSKDTIGSRSTPQTFLHWVYCMENLDLLGPTDVDALMSMLRSLSRVDLQRQVQTLMGLHLSGPSHSQHYRHTPLETDFYDYKDDDDKTSGSGEGRGSLLTCGDVEENPGPHMTEYKPTVRLATRDDVPRAVRTLAAAFADYPATRHTVDPDRHIERVTELQELFLTRVGLDIGKVWVADDGAAVAVWTTPESVEAGAVFAEIGPRMAELSGSRLAAQQQMEGLLAPHRPKEPAWFLATVGVSPDHQGKGLGSAVVLPGVEAAERAGVPAFLETSAPRNLPFYERLGFTVTADVEVPEGPRTWCMTRKPGA

SEQ ID NO: 2863 - protein, 913 aa, Artificial Sequence
  Synthetic Polypeptide
MALPVTALLLPLALLLHAARPDDIQMTQSSSSFSVSLGDRVTITCMASEDIYIRLAWYQQKPGNAPRLLISAATSLETGVPSRFSGSGSGKDYTLSITSLQTEDVGTYYCQQYWSSPWTFGGGTKLEINGGGGSGGGGSGGGGSDVQLQESGPGLVKPSQSLSLTCTVTGYSITSDYTWNWIRQFPGNKLEWMGYITYSGSTSYNPSLKSRNSITRDTSKNQFFLQLNSVTTEDTATYYCARLGRRYTMDYWGQGTSVTVSSTREQKLISEEDLAKPTTTPAPRPPTPAPTIASQPLSLRPEACRPAAGGAVHTRGLDFACDIYIWAPLAGTCGVLLLSLVITLYCGRARVKFSRSADAPAYQQGQNQLYNELNLGRREEYDVLDKRRGRDPEMGGKPRRKNPQEGLYNELQKDKMAEAYSEIGMKGERRRGKGHDGLYQGLSTATKDTYDALHMQALPPRSRGSGATNFSLLKQAGDVEENPGPGIHMATYEVLCEVARKLGTDDREVVLFLLNVFIPQPTLAQLIGALRALKEEGRLTFPLLAECLFRAGRRDLLRDLLHLDPRFLERHLAGTMSYFSPYQLTVLHVDGELCARDIRSLIFLSKDTIGSRSTPQTFLHWVYCMENLDLLGPTDVDALMSMLRSLSRVDLQRQVQTLMGLHLSGPSHSQHYRHTPLETDFYDYKDDDDKTSGSGEGRGSLLTCGDVEENPGPHMTEYKPTVRLATRDDVPRAVRTLAAAFADYPATRHTVDPDRHIERVTELQELFLTRVGLDIGKVWVADDGAAVAVWTTPESVEAGAVFAEIGPRMAELSGSRLAAQQQMEGLLAPHRPKEPAWFLATVGVSPDHQGKGLGSAVVLPGVEAAERAGVPAFLETSAPRNLPFYERLGFTVTADVEVPEGPRTWCMTRKPGA

SEQ ID NO: 2864 - protein, 912 aa, Artificial Sequence
  Synthetic Polypeptide
MALPVTALLLPLALLLHAARPDVQLQESGPGLVKPSQSLSLTCTVTGYSITSDYTWNWIRQFPGNKLEWMGYITYSGSTSYNPSLKSRNSITRDTSKNQFFLQLNSVTTEDTATYYCARLGRRYTMDYWGQGTSVTVSSGGGGSGGGGSGGGGSDIQMTQSSSSFSVSLGDRVTITCMASEDIYIRLAWYQQKPGNAPRLLISAATSLETGVPSRFSGSGSGKDYTLSITSLQTEDVGTYYCQQYWSSPWTFGGGTKLEINTREQKLISEEDLAKPTTTPAPRPPTPAPTIASQPLSLRPEACRPAAGGAVHTRGLDFACDIYIWAPLAGTCGVLLLSLVITLYCGRARVKFSRSADAPAYQQGQNQLYNELNLGRREEYDVLDKRRGRDPEMGGKPRRKNPQEGLYNELQKDKMAEAYSEIGMKGERRRGKGHDGLYQGLSTATKDTYDALHMQALPPRSRGSGATNFSLLKQAGDVEENPGPGIHMATYEVLCEVARKLGTDDREVVLFLLNVFIPQPTLAQLIGALRALKEEGRLTFPLLAECLFRAGRRDLLRDLLHLDPRFLERHLAGTMSYFSPYQLTVLHVDGELCARDIRSLIFLSKDTIGSRSTPQTFLHWVYCMENLDLLGPTDVDALMSMLRSLSRVDLQRQVQTLMGLHLSGPSHSQHYRHTPLETDFYDYKDDDDKTSGSGEGRGSLLTCGDVEENPGPHMTEYKPTVRLATRDDVPRAVRTLAAAFADYPATRHTVDPDRHIERVTELQELFLTRVGLDIGKVWVADDGAAVAVWTTPESVEAGAVFAEIGPRMAELSGSRLAAQQQMEGLLAPHRPKEPAWFLATVGVSPDHQGKGLGSAVVLPGVEAAERAGVPAFLETSAPRNLPFYERLGFTVTADVEVPEGPRTWCMTRKPGA

SEQ ID NO: 2865 - protein, 913 aa, Artificial Sequence
  Synthetic Polypeptide
MALPVTALLLPLALLLHAARPDIQMTQSSSSFSVSLGDRVTITCKASEDIYIRLAWYQQKPGNAPRLLISAATSLETGIPSRFSGSGSGEDYTLTITSLQTEDVATYYCQQYWTTPWTFGGGTKLEIKRGGGGSGGGGSGGGGSDVQLQESGPGLVKPSQSLSLTCTVTGYSITIDYTWNWIRQFPGNKLEWMGYITYSGSTDYNPSLKSRSSITRDTSMNQFFLQLNSVTTEDTATYYCARLGRRYALDYWGQGTSVTVSSTREQKLISEEDLAKPTTTPAPRPPTPAPTIASQPLSLRPEACRPAAGGAVHTRGLDFACDIYIWAPLAGTCGVLLLSLVITLYCGRARVKFSRSADAPAYQQGQNQLYNELNLGRREEYDVLDKRRGRDPEMGGKPRRKNPQEGLYNELQKDKMAEAYSEIGMKGERRRGKGHDGLYQGLSTATKDTYDALHMQALPPRSRGSGATNFSLLKQAGDVEENPGPGIHMATYEVLCEVARKLGTDDREVVLFLLNVFIPQPTLAQLIGALRALKEEGRLTFPLLAECLFRAGRRDLLRDLLHLDPRFLERHLAGTMSYFSPYQLTVLHVDGELCARDIRSLIFLSKDTIGSRSTPQTFLHWVYCMENLDLLGPTDVDALMSMLRSLSRVDLQRQVQTLMGLHLSGPSHSQHYRHTPLETDFYDYKDDDDKTSGSGEGRGSLLTCGDVEENPGPHMTEYKPTVRLATRDDVPRAVRTLAAAFADYPATRHTVDPDRHIERVTELQELFLTRVGLDIGKVWVADDGAAVAVWTTPESVEAGAVFAEIGPRMAELSGSRLAAQQQMEGLLAPHRPKEPAWFLATVGVSPDHQGKGLGSAVVLPGVEAAERAGVPAFLETSAPRNLPFYERLGFTVTADVEVPEGPRTWCMTRKPGA

SEQ ID NO: 2866 - protein, 914 aa, Artificial Sequence
  Synthetic Polypeptide
MALPVTALLLPLALLLHAARPDIVMTQAAPSIPVTPGESVSISCRSDKSLLHSNGNTYLFWFLQRPGQSPQLLIYRMSNLASGVPDRFSGSGSGTAFTLRISGVEAEDVGVYYCMQHLEYPYTFGGGTKLEIKGGGGSGGGGSGGGGSQVQLQQSGPELVKPGASVKMSCKASGYAFSSSWLNWVRQRPGKGLEWIGRIYPGDGENHYNGKFKGKATLTADKSSSTGYMQLSSLTSEDSAVYFCASYYEGGYWGQGTLITVSATREQKLISEEDLAKPTTTPAPRPPTPAPTIASQPLSLRPEACRPAAGGAVHTRGLDFACDIYIWAPLAGTCGVLLLSLVITLYCGRARVKFSRSADAPAYQQGQNQLYNELNLGRREEYDVLDKRRGRDPEMGGKPRRKNPQEGLYNELQKDKMAEAYSEIGMKGERRRGKGHDGLYQGLSTATKDTYDALHMQALPPRSRGSGATNFSLLKQAGDVEENPGPGIHMATYEVLCEVARKLGTDDREVVLFLLNVFIPQPTLAQLIGALRALKEEGRLTFPLLAECLFRAGRRDLLRDLLHLDPRFLERHLAGTMSYFSPYQLTVLHVDGELCARDIRSLIFLSKDTIGSRSTPQTFLHWVYCMENLDLLGPTDVDALMSMLRSLSRVDLQRQVQTLMGLHLSGPSHSQHYRHTPLETDFYDYKDDDDKTSGSGEGRGSLLTCGDVEENPGPHMTEYKPTVRLATRDDVPRAVRTLAAAFADYPATRHTVDPDRHIERVTELQELFLTRVGLDIGKVWVADDGAAVAVWTTPESVEAGAVFAEIGPRMAELSGSRLAAQQQMEGLLAPHRPKEPAWFLATVGVSPDHQGKGLGSAVVLPGVEAAERAGVPAFLETSAPRNLPFYERLGFTVTADVEVPEGPRTWCMTRKPGA

SEQ ID NO: 2867 - protein, 913 aa, Artificial Sequence
  Synthetic Polypeptide
MALPVTALLLPLALLLHAARPDIVLTQSPASLAVSLGQSVTISCRASESVEYYGTSLMQWYQQKPGQPPKLLIYGASNVESGVPARFSGSGSGTDFSLNIHPVEEDDIAMYFCQQSRKVPWTFGGGTKLEIKGGGGSGGGGSGGGGSEVKLVESGGGLVKPGGSRKLSCAASGFTFSSYTMSWVRQTPAKRLEWVATISSGSSTIYYADTVKGRFTISRDNAKNTLFLQMTSLRSEDTAMYYCARRWFLDCWGQGTTLTVSSTREQKLISEEDLAKPTTTPAPRPPTPAPTIASQPLSLRPEACRPAAGGAVHTRGLDFACDIYIWAPLAGTCGVLLLSLVITLYCGRARVKFSRSADAPAYQQGQNQLYNELNLGRREEYDVLDKRRGRDPEMGGKPRRKNPQEGLYNELQKDKMAEAYSEIGMKGERRRGKGHDGLYQGLSTATKDTYDALHMQALPPRSRGSGATNFSLLKQAGDVEENPGPGIHMATYEVLCEVARKLGTDDREVVLFLLNVFIPQPTLAQLIGALRALKEEGRLTFPLLAECLFRAGRRDLLRDLLHLDPRFLERHLAGTMSYFSPYQLTVLHVDGELCARDIRSLIFLSKDTIGSRSTPQTFLHWVYCMENLDLLGPTDVDALMSMLRSLSRVDLQRQVQTLMGLHLSGPSHSQHYRHTPLETDFYDYKDDDDKTSGSGEGRGSLLTCGDVEENPGPHMTEYKPTVRLATRDDVPRAVRTLAAAFADYPATRHTVDPDRHIERVTELQELFLTRVGLDIGKVWVADDGAAVAVWTTPESVEAGAVFAEIGPRMAELSGSRLAAQQQMEGLLAPHRPKEPAWFLATVGVSPDHQGKGLGSAVVLPGVEAAERAGVPAFLETSAPRNLPFYERLGFTVTADVEVPEGPRTWCMTRKPGA

SEQ ID NO: 2868 - protein, 916 aa, Artificial Sequence
  Synthetic Polypeptide
MALPVTALLLPLALLLHAARPDQVQLQQSGPGLVKPSETLSLTCTVSGDSISSYYWSWIRQPPGKGLEWIGYIYYSGSTNYNPSLKSRVTISVDTSKSQFSLKLSSVTAADTAVYYCARGRYFDVWGRGTMVTSSGGGGSGGGGSGGGGSSSYVLTQPPSVSGSPGQSITISCTGTSSDVGGYNYVSWYQQHPGKAPKLMIYEGSKRPSGVSNRFSGSKSGNTASLTISGLQAEDEADYYCSSYTTRSTRVFGGGTKLTVLGAAATREQKLISEEDLAKPTTTPAPRPPTPAPTIASQPLSLRPEACRPAAGGAVHTRGLDFACDIYIWAPLAGTCGVLLLSLVITLYCGRARVKFSRSADAPAYQQGQNQLYNELNLGRREEYDVLDKRRGRDPEMGGKPRRKNPQEGLYNELQKDKMAEAYSEIGMKGERRRGKGHDGLYQGLSTATKDTYDALHMQALPPRSRGSGATNFSLLKQAGDVEENPGPGIHMATYEVLCEVARKLGTDDREVVLFLLNVFIPQPTLAQLIGALRALKEEGRLTFPLLAECLFRAGRRDLLRDLLHLDPRFLERHLAGTMSYFSPYQLTVLHVDGELCARDIRSLIFLSKDTIGSRSTPQTFLHWVYCMENLDLLGPTDVDALMSMLRSLSRVDLQRQVQTLMGLHLSGPSHSQHYRHTPLETDFYDYKDDDDKTSGSGEGRGSLLTCGDVEENPGPHMTEYKPTVRLATRDDVPRAVRTLAAAFADYPATRHTVDPDRHIERVTELQELFLTRVGLDIGKVWVADDGAAVAVWTTPESVEAGAVFAEIGPRMAELSGSRLAAQQQMEGLLAPHRPKEPAWFLATVGVSPDHQGKGLGSAVVLPGVEAAERAGVPAFLETSAPRNLPFYERLGFTVTADVEVPEGPRTWCMTRKPGA

SEQ ID NO: 2869 - protein, 917 aa, Artificial Sequence
  Synthetic Polypeptide
MALPVTALLLPLALLLHAARPDIVMTQSPLSLPVTPGEPASISCRSSKSLLHSNGNTYLYWFQQKPGQAPRLLIYRMSNLASGVPDRFSGSGSGTAFTLKISRVEAEDVGVYYCMQHIEYPFTFGQGTKLEIKGGGGSGGGGSGGGGSQVQLVQSGPEVKKPGASVKVSCKASGYTFTNSWMNWVRQRPGKGLEWIGRIYPGDGETIYNGKFRVRVTITADESTSTAYMELSSLRSEDTAVYYCARGYDDYSFAYWGQGTTVTVSSTREQKLISEEDLAKPTTTPAPRPPTPAPTIASQPLSLRPEACRPAAGGAVHTRGLDFACDIYIWAPLAGTCGVLLLSLVITLYCGRARVKFSRSADAPAYQQGQNQLYNELNLGRREEYDVLDKRRGRDPEMGGKPRRKNPQEGLYNELQKDKMAEAYSEIGMKGERRRGKGHDGLYQGLSTATKDTYDALHMQALPPRSRGSGATNFSLLKQAGDVEENPGPGIHMATYEVLCEVARKLGTDDREVVLFLLNVFIPQPTLAQLIGALRALKEEGRLTFPLLAECLFRAGRRDLLRDLLHLDPRFLERHLAGTMSYFSPYQLTVLHVDGELCARDIRSLIFLSKDTIGSRSTPQTFLHWVYCMENLDLLGPTDVDALMSMLRSLSRVDLQRQVQTLMGLHLSGPSHSQHYRHTPLETDFYDYKDDDDKTSGSGEGRGSLLTCGDVEENPGPHMTEYKPTVRLATRDDVPRAVRTLAAAFADYPATRHTVDPDRHIERVTELQELFLTRVGLDIGKVWVADDGAAVAVWTTPESVEAGAVFAEIGPRMAELSGSRLAAQQQMEGLLAPHRPKEPAWFLATVGVSPDHQGKGLGSAVVLPGVEAAERAGVPAFLETSAPRNLPFYERLGFTVTADVEVPEGPRTWCMTRKPGA

SEQ ID NO: 2870 - protein, 917 aa, Artificial Sequence
  Synthetic Polypeptide
MALPVTALLLPLALLLHAARPDEIVMTQSPATLSLSPGERATLSCRASQSVSSYLAWYQQKPGQAPRLLIYDASNRATGIPARFSGSGSGTDFTLTISSLEPEDFAVYYCHQYGSSPQTFGQGTKVEIKRGGGGSGGGGSGGGGSEVQLVQSGAEVKKPGSSVKVSCKASGGTFSSYAISWVRQAPGQGLEWMGGIIPIFGTANYAQKFQGRVTITADESTSTAYMELSSLRSEDTAVYYCAVHYGDYVFSSMDVWGQGTTVTVSSTREQKLISEEDLAKPTTTPAPRPPTPAPTIASQPLSLRPEACRPAAGGAVHTRGLDFACDIYIWAPLAGTCGVLLLSLVITLYCGRARVKFSRSADAPAYQQGQNQLYNELNLGRREEYDVLDKRRGRDPEMGGKPRRKNPQEGLYNELQKDKMAEAYSEIGMKGERRRGKGHDGLYQGLSTATKDTYDALHMQALPPRSRGSGATNFSLLKQAGDVEENPGPGIHMATYEVLCEVARKLGTDDREVVLFLLNVFIPQPTLAQLIGALRALKEEGRLTFPLLAECLFRAGRRDLLRDLLHLDPRFLERHLAGTMSYFSPYQLTVLHVDGELCARDIRSLIFLSKDTIGSRSTPQTFLHWVYCMENLDLLGPTDVDALMSMLRSLSRVDLQRQVQTLMGLHLSGPSHSQHYRHTPLETDFYDYKDDDDKTSGSGEGRGSLLTCGDVEENPGPHMTEYKPTVRLATRDDVPRAVRTLAAAFADYPATRHTVDPDRHIERVTELQELFLTRVGLDIGKVWVADDGAAVAVWTTPESVEAGAVFAEIGPRMAELSGSRLAAQQQMEGLLAPHRPKEPAWFLATVGVSPDHQGKGLGSAVVLPGVEAAERAGVPAFLETSAPRNLPFYERLGFTVTADVEVPEGPRTWCMTRKPGA

SEQ ID NO: 2871 - protein, 920 aa, Artificial Sequence
  Synthetic Polypeptide
MALPVTALLLPLALLLHAARPDETTLTQSPGTLSLSPGERATLSCRASQSVSSSYLAWYQQKPGQAPRLLIYGASSRATGIPDRFSGSGSGTDFTLTISRLEPEDFAVYYCQQYGSSPRTFGQGTKVEIKRGGGGSGGGGSGGGGSEVQLVQSGAEVKKPGSSVKVSCKASGGTFSSYAISWVRQAPGQGLEWMGGIIPIFGTANYAQKFQGRVTITADESTSTAYMELSSLRSEDTAVYYCARGPEYCINGVCSLDVWGQGTTVTVSSTREQKLISEEDLAKPTTTPAPRPPTPAPTIASQPLSLRPEACRPAAGGAVHTRGLDFACDIYIWAPLAGTCGVLLLSLVITLYCGRARVKFSRSADAPAYQQGQNQLYNELNLGRREEYDVLDKRRGRDPEMGGKPRRKNPQEGLYNELQKDKMAEAYSEIGMKGERRRGKGHDGLYQGLSTATKDTYDALHMQALPPRSRGSGATNFSLLKQAGDVEENPGPGIHMATYEVLCEVARKLGTDDREVVLFLLNVFIPQPTLAQLIGALRALKEEGRLTFPLLAECLFRAGRRDLLRDLLHLDPRFLERHLAGTMSYFSPYQLTVLHVDGELCARDIRSLIFLSKDTIGSRSTPQTFLHWVYCMENLDLLGPTDVDALMSMLRSLSRVDLQRQVQTLMGLHLSGPSHSQHYRHTPLETDFYDYKDDDDKTSGSGEGRGSLLTCGDVEENPGPHMTEYKPTVRLATRDDVPRAVRTLAAAFADYPATRHTVDPDRHIERVTELQELFLTRVGLDIGKVWVADDGAAVAVWTTPESVEAGAVFAEIGPRMAELSGSRLAAQQQMEGLLAPHRPKEPAWFLATVGVSPDHQGKGLGSAVVLPGVEAAERAGVPAFLETSAPRNLPFYERLGFTVTADVEVPEGPRTWCMTRKPGA

SEQ ID NO: 2872 - protein, 922 aa, Artificial Sequence
  Synthetic Polypeptide
MALPVTALLLPLALLLHAARPDIELTQSPSSLAVSAGEKVTMSCKSSQSLLNSRTRKNQLAWYQQKPGQSPELLIYWASTRQSGVPDRFTGSGSGTDFTLTISSVQAEDLAVYYCQQSYNLLTFGPGTKLEVKRGGGGSGGGGSGGGGSVKLQESGGGFVKPGGSLKVSCAASGFTFSSYAMSWVRLSPEMRLEWVATISSAGGYIFYSDSVQGRFTISRDNAKNTLHLQMGSLRSGDTAMYYCARQGFGNYGDYYAMDYWGQGTTVTVSSTREQKLISEEDLAKPTTTPAPRPPTPAPTIASQPLSLRPEACRPAAGGAVHTRGLDFACDIYIWAPLAGTCGVLLLSLVITLYCGRARVKFSRSADAPAYQQGQNQLYNELNLGRREEYDVLDKRRGRDPEMGGKPRRKNPQEGLYNELQKDKMAEAYSEIGMKGERRRGKGHDGLYQGLSTATKDTYDALHMQALPPRSRGSGATNFSLLKQAGDVEENPGPGIHMATYEVLCEVARKLGTDDREVVLFLLNVFIPQPTLAQLIGALRALKEEGRLTFPLLAECLFRAGRRDLLRDLLHLDPRFLERHLAGTMSYFSPYQLTVLHVDGELCARDIRSLIFLSKDTIGSRSTPQTFLHWVYCMENLDLLGPTDVDALMSMLRSLSRVDLQRQVQTLMGLHLSGPSHSQHYRHTPLETDFYDYKDDDDKTSGSGEGRGSLLTCGDVEENPGPHMTEYKPTVRLATRDDVPRAVRTLAAAFADYPATRHTVDPDRHIERVTELQELFLTRVGLDIGKVWVADDGAAVAVWTTPESVEAGAVFAEIGPRMAELSGSRLAAQQQMEGLLAPHRPKEPAWFLATVGVSPDHQGKGLGSAVVLPGVEAAERAGVPAFLETSAPRNLPFYERLGFTVTADVEVPEGPRTWCMTRKPGA

SEQ ID NO: 2873 - protein, 921 aa, Artificial Sequence
  Synthetic Polypeptide
MALPVTALLLPLALLLHAARPDIQMTQSPSSLSASVGDRVTITCRSSQNIVHSNGNTYLDWYQQTPGKAPKLLIYKVSNRFSGVPSRFSGSGSGTDFTFTISSLQPEDIATYYCFQYSHVPWTFGQGTKLQIGGGGSGGGGSGGGGSQVQLQQSGAEVKKPGSSVKVSCKASGYTFTNYYIYWVRQAPGQGLEWIGGINPTSGGSNFNEKFKTRVTITADESSTTAYMELSSLRSEDTAFYFCTRQGLWFDSDGRGFDFWGQGTTVTVSSTREQKLISEEDLAKPTTTPAPRPPTPAPTIASQPLSLRPEACRPAAGGAVHTRGLDFACDIYIWAPLAGTCGVLLLSLVITLYCGRARVKFSRSADAPAYQQGQNQLYNELNLGRREEYDVLDKRRGRDPEMGGKPRRKNPQEGLYNELQKDKMAEAYSEIGMKGERRRGKGHDGLYQGLSTATKDTYDALHMQALPPRSRGSGATNFSLLKQAGDVEENPGPGIHMATYEVLCEVARKLGTDDREVVLFLLNVFIPQPTLAQLIGALRALKEEGRLTFPLLAECLFRAGRRDLLRDLLHLDPRFLERHLAGTMSYFSPYQLTVLHVDGELCARDIRSLIFLSKDTIGSRSTPQTFLHWVYCMENLDLLGPTDVDALMSMLRSLSRVDLQRQVQTLMGLHLSGPSHSQHYRHTPLETDFYDYKDDDDKTSGSGEGRGSLLTCGDVEENPGPHMTEYKPTVRLATRDDVPRAVRTLAAAFADYPATRHTVDPDRHIERVTELQELFLTRVGLDIGKVWVADDGAAVAVWTTPESVEAGAVFAEIGPRMAELSGSRLAAQQQMEGLLAPHRPKEPAWFLATVGVSPDHQGKGLGSAVVLPGVEAAERAGVPAFLETSAPRNLPFYERLGFTVTADVEVPEGPRTWCMTRKPGA

SEQ ID NO: 2874 - protein, 817 aa, Artificial Sequence
  Synthetic Polypeptide
MALPVTALLLPLALLLHAARPLFNQEVQIPLTESYCGPCPKNWICYKNNCYQFFDESKNWYESQASCMSQNASLLKVYSKEDQDLLKLVKSYHWMGLVHIPTNGSWQWEDGSILSPNLLTIIEMQKGDCALYASSFKGYIENCSTPNTYICMQRTVGGGGSGGGGDTREQKLISEEDLAKPTTTPAPRPPTPAPTIASQPLSLRPEACRPAAGGAVHTRGLDFACDIYIWAPLAGTCGVLLLSLVITLYCGRARVKFSRSADAPAYQQGQNQLYNELNLGRREEYDVLDKRRGRDPEMGGKPRRKNPQEGLYNELQKDKMAEAYSEIGMKGERRRGKGHDGLYQGLSTATKDTYDALHMQALPPRSRGSGATNFSLLKQAGDVEENPGPGIHMATYEVLCEVARKLGTDDREVVLFLLNVFIPQPTLAQLIGALRALKEEGRLTFPLLAECLFRAGRRDLLRDLLHLDPRFLERHLAGTMSYFSPYQLTVLHVDGELCARDIRSLIFLSKDTIGSRSTPQTFLHWVYCMENLDLLGPTDVDALMSMLRSLSRVDLQRQVQTLMGLHLSGPSHSQHYRHTPLETDFYDYKDDDDKTSGSGEGRGSLLTCGDVEENPGPHMTEYKPTVRLATRDDVPRAVRTLAAAFADYPATRHTVDPDRHIERVTELQELFLTRVGLDIGKVWVADDGAAVAVWTTPESVEAGAVFAEIGPRMAELSGSRLAAQQQMEGLLAPHRPKEPAWFLATVGVSPDHQGKGLGSAVVLPGVEAAERAGVPAFLETSAPRNLPFYERLGFTVTADVEVPEGPRTWCMTRKPGA

SEQ ID NO: 2875 - protein, 911 aa, Artificial Sequence
  Synthetic Polypeptide
MALPVTALLLPLALLLHAARPEIVLTQSPGTLSLSPGERATLSCRASQSVSSSYLAWYQQKPGQAPRLLIYGASSRATGIPDRFSGSGSGTDFTLTISRLEPEDFAVYYCQQYGSSPWTFGQGTKVEIKRGGGGSGGGGSGGGGSQVHLQESGPGLVKPSETLSLTCTVSDDSISSYYWSWIRQPPGKGLEWIGHISYSGSANYNPSLKSRVTISVDTSKNQFSLKLSSVTAADTAVYYCANWDDAFNIWGQGTMVTVSSTREQKLISEEDLAKPTTTPAPRPPTPAPTIASQPLSLRPEACRPAAGGAVHTRGLDFACDIYIWAPLAGTCGVLLLSLVITLYCGRARVKFSRSADAPAYQQGQNQLYNELNLGRREEYDVLDKRRGRDPEMGGKPRRKNPQEGLYNELQKDKMAEAYSEIGMKGERRRGKGHDGLYQGLSTATKDTYDALHMQALPPRSRGSGATNFSLLKQAGDVEENPGPGIHMATYEVLCEVARKLGTDDREVVLFLLNVFIPQPTLAQLIGALRALKEEGRLTFPLLAECLFRAGRRDLLRDLLHLDPRFLERHLAGTMSYFSPYQLTVLHVDGELCARDIRSLIFLSKDTIGSRSTPQTFLHWVYCMENLDLLGPTDVDALMSMLRSLSRVDLQRQVQTLMGLHLSGPSHSQHYRHTPLETDFYDYKDDDDKTSGSGEGRGSLLTCGDVEENPGPHMTEYKPTVRLATRDDVPRAVRTLAAAFADYPATRHTVDPDRHIERVTELQELFLTRVGLDIGKVWVADDGAAVAVWTTPESVEAGAVFAEIGPRMAELSGSRLAAQQQMEGLLAPHRPKEPAWFLATVGVSPDHQGKGLGSAVVLPGVEAAERAGVPAFLETSAPRNLPFYERLGFTVTADVEVPEGPRTWCMTRKPGA

SEQ ID NO: 2876 - protein, 913 aa, Artificial Sequence
  Synthetic Polypeptide
MALPVTALLLPLALLLHAARPDVVMTQTPLTLSVTIGQPASISCKSSQSLLDSDGKTYLHWLLQRPGQSPKRLIFLVSKLDSGVPDRFTGSGSGTDFTLKISRVEAEDLGVYYCWQGTHFPQTFGGGTKLEIKGGGGSGGGGSGGGGSVQLQESGPDLVKPSQSLSLTCTVTGYSITSGYSWHWIRQFPGNKLEWMGYIHYSGDTDYNPSLKSRFSITRDTSKNQFFLQLNSVTTEDTATYYCATPGGFVYWGQGTLVTVSSTREQKLISEEDLAKPTTTPAPRPPTPAPTIASQPLSLRPEACRPAAGGAVHTRGLDFACDIYIWAPLAGTCGVLLLSLVITLYCGRARVKFSRSADAPAYQQGQNQLYNELNLGRREEYDVLDKRRGRDPEMGGKPRRKNPQEGLYNELQKDKMAEAYSEIGMKGERRRGKGHDGLYQGLSTATKDTYDALHMQALPPRSRGSGATNFSLLKQAGDVEENPGPGIHMATYEVLCEVARKLGTDDREVVLFLLNVFIPQPTLAQLIGALRALKEEGRLTFPLLAECLFRAGRRDLLRDLLHLDPRFLERHLAGTMSYFSPYQLTVLHVDGELCARDIRSLIFLSKDTIGSRSTPQTFLHWVYCMENLDLLGPTDVDALMSMLRSLSRVDLQRQVQTLMGLHLSGPSHSQHYRHTPLETDFYDYKDDDDKTSGSGEGRGSLLTCGDVEENPGPHMTEYKPTVRLATRDDVPRAVRTLAAAFADYPATRHTVDPDRHIERVTELQELFLTRVGLDIGKVWVADDGAAVAVWTTPESVEAGAVFAEIGPRMAELSGSRLAAQQQMEGLLAPHRPKEPAWFLATVGVSPDHQGKGLGSAVVLPGVEAAERAGVPAFLETSAPRNLPFYERLGFTVTADVEVPEGPRTWCMTRKPGA

SEQ ID NO: 2877 - protein, 917 aa, Artificial Sequence
  Synthetic Polypeptide
MALPVTALLLPLALLLHAARPDQSELTQPRSVSGSPGQSVTISCTGTERDVGGYNYVSWYQQHPGKAPKLIIHDVIERSSGVPDRFSGSKSGNTASLTISGLQAEDEADYYCWSFAGGYYVFGTGTDVTVLGGGGSGGGGSGGGGSFEVQLLESGGGLVQPGGSLRLSCAASGFTFSTYQMSWVRQAPGKGLEWVSGIVSSGGSTAYADSVKGRFTISRDNSKNTLYLQMNSLRAEDTAVYYCAGELLPYYGMDVWGQGTTVTVSSTREQKLISEEDLAKPTTTPAPRPPTPAPTIASQPLSLRPEACRPAAGGAVHTRGLDFACDIYIWAPLAGTCGVLLLSLVITLYCGRARVKFSRSADAPAYQQGQNQLYNELNLGRREEYDVLDKRRGRDPEMGGKPRRKNPQEGLYNELQKDKMAEAYSEIGMKGERRRGKGHDGLYQGLSTATKDTYDALHMQALPPRSRGSGATNFSLLKQAGDVEENPGPGIHMATYEVLCEVARKLGTDDREVVLFLLNVFIPQPTLAQLIGALRALKEEGRLTFPLLAECLFRAGRRDLLRDLLHLDPRFLERHLAGTMSYFSPYQLTVLHVDGELCARDIRSLIFLSKDTIGSRSTPQTFLHWVYCMENLDLLGPTDVDALMSMLRSLSRVDLQRQVQTLMGLHLSGPSHSQHYRHTPLETDFYDYKDDDDKTSGSGEGRGSLLTCGDVEENPGPHMTEYKPTVRLATRDDVPRAVRTLAAAFADYPATRHTVDPDRHIERVTELQELFLTRVGLDIGKVWVADDGAAVAVWTTPESVEAGAVFAEIGPRMAELSGSRLAAQQQMEGLLAPHRPKEPAWFLATVGVSPDHQGKGLGSAVVLPGVEAAERAGVPAFLETSAPRNLPFYERLGFTVTADVEVPEGPRTWCMTRKPGA

SEQ ID NO: 2878 - protein, 916 aa, Artificial Sequence
  Synthetic Polypeptide
MALPVTALLLPLALLLHAARPDQSELTQPRSVSGSPGQSVTISCTGTERDVGGYNYVSWYQQHPGKAPKLIIHDVIERSSGVPDRFSGSKSGNTASLTISGLQAEDEADYYCWSFAGGYYVFGTGTDVTVLGGGGSGGGGSGGGGSEVQLLESGGGLVQPGGSLRLSCAASGFTFSTYEMHWVRQAPGKGLEWVSVILSSGGETNYADSVKGRFTISRDNSKNTLYLQMNSLRAEDTAVYYCAGMLLPYYGMDVWGQGTTVTVSSTREQKLISEEDLAKPTTTPAPRPPTPAPTIASQPLSLRPEACRPAAGGAVHTRGLDFACDIYIWAPLAGTCGVLLLSLVITLYCGRARVKFSRSADAPAYQQGQNQLYNELNLGRREEYDVLDKRRGRDPEMGGKPRRKNPQEGLYNELQKDKMAEAYSEIGMKGERRRGKGHDGLYQGLSTATKDTYDALHMQALPPRSRGSGATNFSLLKQAGDVEENPGPGIHMATYEVLCEVARKLGTDDREVVLFLLNVFIPQPTLAQLIGALRALKEEGRLTFPLLAECLFRAGRRDLLRDLLHLDPRFLERHLAGTMSYFSPYQLTVLHVDGELCARDIRSLIFLSKDTIGSRSTPQTFLHWVYCMENLDLLGPTDVDALMSMLRSLSRVDLQRQVQTLMGLHLSGPSHSQHYRHTPLETDFYDYKDDDDKTSGSGEGRGSLLTCGDVEENPGPHMTEYKPTVRLATRDDVPRAVRTLAAAFADYPATRHTVDPDRHIERVTELQELFLTRVGLDIGKVWVADDGAAVAVWTTPESVEAGAVFAEIGPRMAELSGSRLAAQQQMEGLLAPHRPKEPAWFLATVGVSPDHQGKGLGSAVVLPGVEAAERAGVPAFLETSAPRNLPFYERLGFTVTADVEVPEGPRTWCMTRKPGA

SEQ ID NO: 2879 - protein, 818 aa, Artificial Sequence
  Synthetic Polypeptide
MALPVTALLLPLALLLHAARPGWFLDSPDRPWNPPTFSPALLVVTEGDNATFTCSFSNTSESFVLNWYRMSPSNQTDKLAAFPEDRSQPGQDCRFRVTQLPNGRDFHMSVVRARRNDSGTYLCGAISLAPKAQIKESLRAELRVTERRAEVPTAHPSPSPRPAGQFQTREQKLISEEDLAKPTTTPAPRPPTPAPTIASQPLSLRPEACRPAAGGAVHTRGLDFACDIYIWAPLAGTCGVLLLSLVITLYCGRARVKFSRSADAPAYQQGQNQLYNELNLGRREEYDVLDKRRGRDPEMGGKPRRKNPQEGLYNELQKDKMAEAYSEIGMKGERRRGKGHDGLYQGLSTATKDTYDALHMQALPPRSRGSGATNFSLLKQAGDVEENPGPGIHMATYEVLCEVARKLGTDDREVVLFLLNVFIPQPTLAQLIGALRALKEEGRLTFPLLAECLFRAGRRDLLRDLLHLDPRFLERHLAGTMSYFSPYQLTVLHVDGELCARDIRSLIFLSKDTIGSRSTPQTFLHWVYCMENLDLLGPTDVDALMSMLRSLSRVDLQRQVQTLMGLHLSGPSHSQHYRHTPLETDFYDYKDDDDKTSGSGEGRGSLLTCGDVEENPGPHMTEYKPTVRLATRDDVPRAVRTLAAAFADYPATRHTVDPDRHIERVTELQELFLTRVGLDIGKVWVADDGAAVAVWTTPESVEAGAVFAEIGPRMAELSGSRLAAQQQMEGLLAPHRPKEPAWFLATVGVSPDHQGKGLGSAVVLPGVEAAERAGVPAFLETSAPRNLPFYERLGFTVTADVEVPEGPRTWCMTRKPGA

SEQ ID NO: 2880 - protein, 913 aa, Artificial Sequence
  Synthetic Polypeptide
MALPVTALLLPLALLLHAARPDIQMTQSPSSLSASVGDRVTITCRASQDVSTAVAWYQQKPGKAPKLLIYSASFLYSGVPSRFSGSGSGTDFTLTISSLQPEDFATYYCQQYLYHPATFGQGTKVEIKRGGGGSGGGGSGGGGSEVQLVESGGGLVQPGGSLRLSCAASGFTFSDSWIHWVRQAPGKGLEWVAWISPYGGSTYYADSVKGRFTISADTSKNTAYLQMNSLRAEDTAVYYCARRHWPGGFDYWGQGTLVTVSSTREQKLISEEDLAKPTTTPAPRPPTPAPTIASQPLSLRPEACRPAAGGAVHTRGLDFACDIYIWAPLAGTCGVLLLSLVITLYCGRARVKFSRSADAPAYQQGQNQLYNELNLGRREEYDVLDKRRGRDPEMGGKPRRKNPQEGLYNELQKDKMAEAYSEIGMKGERRRGKGHDGLYQGLSTATKDTYDALHMQALPPRSRGSGATNFSLLKQAGDVEENPGPGIHMATYEVLCEVARKLGTDDREVVLFLLNVFIPQPTLAQLIGALRALKEEGRLTFPLLAECLFRAGRRDLLRDLLHLDPRFLERHLAGTMSYFSPYQLTVLHVDGELCARDIRSLIFLSKDTIGSRSTPQTFLHWVYCMENLDLLGPTDVDALMSMLRSLSRVDLQRQVQTLMGLHLSGPSHSQHYRHTPLETDFYDYKDDDDKTSGSGEGRGSLLTCGDVEENPGPHMTEYKPTVRLATRDDVPRAVRTLAAAFADYPATRHTVDPDRHIERVTELQELFLTRVGLDIGKVWVADDGAAVAVWTTPESVEAGAVFAEIGPRMAELSGSRLAAQQQMEGLLAPHRPKEPAWFLATVGVSPDHQGKGLGSAVVLPGVEAAERAGVPAFLETSAPRNLPFYERLGFTVTADVEVPEGPRTWCMTRKPGA

SEQ ID NO: 2881 - protein, 914 aa, Artificial Sequence
  Synthetic Polypeptide
MALPVTALLLPLALLLHAARPAIVMTQTPSPVSAAVGGTVTINCQASESVYSNNYLSWFQQKPGQPPKLLIYLASTLASGVPSRFKGSGSGTQFTLTISGVQCDDAATYYCIGGKSSSTDGNAFGGGTEVVVRGGGGSGGGGSGGGGSQSLEESGGRLVKPDETLTITCTVSGIDLSSNGLTWVRQAPGEGLEWIGTINKDASAYYASWAKGRLTISKPSSTKVDLKITSPTTEDTATYFCGRIAFKTGTSIWGPGTLVTVSSTREQKLISEEDLAKPTTTPAPRPPTPAPTIASQPLSLRPEACRPAAGGAVHTRGLDFACDIYIWAPLAGTCGVLLLSLVITLYCGRARVKFSRSADAPAYQQGQNQLYNELNLGRREEYDVLDKRRGRDPEMGGKPRRKNPQEGLYNELQKDKMAEAYSEIGMKGERRRGKGHDGLYQGLSTATKDTYDALHMQALPPRSRGSGATNFSLLKQAGDVEENPGPGIHMATYEVLCEVARKLGTDDREVVLFLLNVFIPQPTLAQLIGALRALKEEGRLTFPLLAECLFRAGRRDLLRDLLHLDPRFLERHLAGTMSYFSPYQLTVLHVDGELCARDIRSLIFLSKDTIGSRSTPQTFLHWVYCMENLDLLGPTDVDALMSMLRSLSRVDLQRQVQTLMGLHLSGPSHSQHYRHTPLETDFYDYKDDDDKTSGSGEGRGSLLTCGDVEENPGPHMTEYKPTVRLATRDDVPRAVRTLAAAFADYPATRHTVDPDRHIERVTELQELFLTRVGLDIGKVWVADDGAAVAVWTTPESVEAGAVFAEIGPRMAELSGSRLAAQQQMEGLLAPHRPKEPAWFLATVGVSPDHQGKGLGSAVVLPGVEAAERAGVPAFLETSAPRNLPFYERLGFTVTADVEVPEGPRTWCMTRKPGA

SEQ ID NO: 2882 - protein, 912 aa, Artificial Sequence
  Synthetic Polypeptide
MALPVTALLLPLALLLHAARPDIQMTQSPSSLSASVGDRVTITCRASQGISSWLAWYQQKPEKAPKSLIYAASSLQSGVPSRFSGSGSGTDFTLTISSLQPEDFATYYCQQYNSYPYTFGQGTKLEIKGGGGSGGGGSGGGGSQVQLVQSGAEVKKPGASVKVSCKASGYTFTSYDVHWVRQAPGQRLEWMGWLHADTGITKFSQKFQGRVTITRDTSASTAYMELSSLRSEDTAVYYCARERIQLWFDYWGQGTLVTVSSTREQKLISEEDLAKPTTTPAPRPPTPAPTIASQPLSLRPEACRPAAGGAVHTRGLDFACDIYIWAPLAGTCGVLLLSLVITLYCGRARVKFSRSADAPAYQQGQNQLYNELNLGRREEYDVLDKRRGRDPEMGGKPRRKNPQEGLYNELQKDKMAEAYSEIGMKGERRRGKGHDGLYQGLSTATKDTYDALHMQALPPRSRGSGATNFSLLKQAGDVEENPGPGIHMATYEVLCEVARKLGTDDREVVLFLLNVFIPQPTLAQLIGALRALKEEGRLTFPLLAECLFRAGRRDLLRDLLHLDPRFLERHLAGTMSYFSPYQLTVLHVDGELCARDIRSLIFLSKDTIGSRSTPQTFLHWVYCMENLDLLGPTDVDALMSMLRSLSRVDLQRQVQTLMGLHLSGPSHSQHYRHTPLETDFYDYKDDDDKTSGSGEGRGSLLTCGDVEENPGPHMTEYKPTVRLATRDDVPRAVRTLAAAFADYPATRHTVDPDRHIERVTELQELFLTRVGLDIGKVWVADDGAAVAVWTTPESVEAGAVFAEIGPRMAELSGSRLAAQQQMEGLLAPHRPKEPAWFLATVGVSPDHQGKGLGSAVVLPGVEAAERAGVPAFLETSAPRNLPFYERLGFTVTADVEVPEGPRTWCMTRKPGA

SEQ ID NO: 2883 - protein, 931 aa, Artificial Sequence
  Synthetic Polypeptide
MALPVTALLLPLALLLHAARPDDIVMTQSPLSLPVTPGEPASISCRSSQSLLHSNGYNYLVWYLQKPGQSPQLLIYLGSIRASGVPDRFSGSGSGTDFTLKISRVEAEDVGVYYCMQPLQTPITFGQGTRLEIKRGGGGSGGGGSGGGGSGLQCVAAPRWVLSQVQLQQWGAGLLKPSETLSLTCAVYGGSFSGNYWSWIRQPPGKGLEWIGEINHSGSTNYNPSLKSRVTISVDTSKNQFSLKLSSVTAADTAVYYCARGGSYNYFDYWGQGTLVTVSSTREQKLISEEDLAKPTTTPAPRPPTPAPTIASQPLSLRPEACRPAAGGAVHTRGLDFACDIYIWAPLAGTCGVLLLSLVITLYCGRARVKFSRSADAPAYQQGQNQLYNELNLGRREEYDVLDKRRGRDPEMGGKPRRKNPQEGLYNELQKDKMAEAYSEIGMKGERRRGKGHDGLYQGLSTATKDTYDALHMQALPPRSRGSGATNFSLLKQAGDVEENPGPGIHMATYEVLCEVARKLGTDDREVVLFLLNVFIPQPTLAQLIGALRALKEEGRLTFPLLAECLFRAGRRDLLRDLLHLDPRFLERHLAGTMSYFSPYQLTVLHVDGELCARDIRSLIFLSKDTIGSRSTPQTFLHWVYCMENLDLLGPTDVDALMSMLRSLSRVDLQRQVQTLMGLHLSGPSHSQHYRHTPLETDFYDYKDDDDKTSGSGEGRGSLLTCGDVEENPGPHMTEYKPTVRLATRDDVPRAVRTLAAAFADYPATRHTVDPDRHIERVTELQELFLTRVGLDIGKVWVADDGAAVAVWTTPESVEAGAVFAEIGPRMAELSGSRLAAQQQMEGLLAPHRPKEPAWFLATVGVSPDHQGKGLGSAVVLPGVEAAERAGVPAFLETSAPRNLPFYERLGFTVTADVEVPEGPRTWCMTRKPGA

SEQ ID NO: 2884 - protein, 928 aa, Artificial Sequence
  Synthetic Polypeptide
MALPVTALLLPLALLLHAARPDQLTQSPSSVSASVGDRVTITCRASRGISSWLAWYQQKPGKAPKLLIYTASSLQSGVPSRFSGSGSGTDFTLTISSLQPEDFATYYCQQAYSFPRTFGQGTKVEIKRGGGGSGGGGSGGGGSVAAPRWVLSQVQLQESGPGLVKPSQTLSLTCTVSGGSISSGGYYWIWIRQHPGKGLEWIGYIYYNGNTYYNPSLKSRVTMSVDTSKNQFSLKLSSVTAADTAVYYCARDGITMIRGYYYGMDVWGQGTTVTVSSTREQKLISEEDLAKPTTTPAPRPPTPAPTIASQPLSLRPEACRPAAGGAVHTRGLDFACDIYIWAPLAGTCGVLLLSLVITLYCGRARVKFSRSADAPAYQQGQNQLYNELNLGRREEYDVLDKRRGRDPEMGGKPRRKNPQEGLYNELQKDKMAEAYSEIGMKGERRRGKGHDGLYQGLSTATKDTYDALHMQALPPRSRGSGATNFSLLKQAGDVEENPGPGIHMATYEVLCEVARKLGTDDREVVLFLLNVFIPQPTLAQLIGALRALKEEGRLTFPLLAECLFRAGRRDLLRDLLHLDPRFLERHLAGTMSYFSPYQLTVLHVDGELCARDIRSLIFLSKDTIGSRSTPQTFLHWVYCMENLDLLGPTDVDALMSMLRSLSRVDLQRQVQTLMGLHLSGPSHSQHYRHTPLETDFYDYKDDDDKTSGSGEGRGSLLTCGDVEENPGPHMTEYKPTVRLATRDDVPRAVRTLAAAFADYPATRHTVDPDRHIERVTELQELFLTRVGLDIGKVWVADDGAAVAVWTTPESVEAGAVFAEIGPRMAELSGSRLAAQQQMEGLLAPHRPKEPAWFLATVGVSPDHQGKGLGSAVVLPGVEAAERAGVPAFLETSAPRNLPFYERLGFTVTADVEVPEGPRTWCMTRKPGA

SEQ ID NO: 2885 - protein, 902 aa, Artificial Sequence
  Synthetic Polypeptide
MALPVTALLLPLALLLHAARPDIVVTQSPASLAVSLGQRATISYRASKSVSTSGYSYMHWNQQKPGQPPRLLIYLVSNLESGVPARFSGSGSGTDFTLNIHPVEEEDAATYYCQHIRELTRSEGGPSWKGGGGSGGGGSGGGGSEVKLEESGGDLVKPGGSLKLSCAASGFTFSGYGMSWVRQTPDKRLEWVATISSGGSYTYYPDSVKGRFTISRDNAKNTLYLQMSSLKSEDTAMYYCARHEGGYYGSSTREQKLISEEDLAKPTTTPAPRPPTPAPTIASQPLSLRPEACRPAAGGAVHTRGLDFACDIYIWAPLAGTCGVLLLSLVITLYCGRARVKFSRSADAPAYQQGQNQLYNELNLGRREEYDVLDKRRGRDPEMGGKPRRKNPQEGLYNELQKDKMAEAYSEIGMKGERRRGKGHDGLYQGLSTATKDTYDALHMQALPPRSRGSGATNFSLLKQAGDVEENPGPGIHMATYEVLCEVARKLGTDDREVVLFLLNVFIPQPTLAQLIGALRALKEEGRLTFPLLAECLFRAGRRDLLRDLLHLDPRFLERHLAGTMSYFSPYQLTVLHVDGELCARDIRSLIFLSKDTIGSRSTPQTFLHWVYCMENLDLLGPTDVDALMSMLRSLSRVDLQRQVQTLMGLHLSGPSHSQHYRHTPLETDFYDYKDDDDKTSGSGEGRGSLLTCGDVEENPGPHMTEYKPTVRLATRDDVPRAVRTLAAAFADYPATRHTVDPDRHIERVTELQELFLTRVGLDIGKVWVADDGAAVAVWTTPESVEAGAVFAEIGPRMAELSGSRLAAQQQMEGLLAPHRPKEPAWFLATVGVSPDHQGKGLGSAVVLPGVEAAERAGVPAFLETSAPRNLPFYERLGFTVTADVEVPEGPRTWCMTRKPGA

SEQ ID NO: 2886 - protein, 918 aa, Artificial Sequence
  Synthetic Polypeptide
MALPVTALLLPLALLLHAARPDDIQMTQSPSSLSASVGDRVTITCRASQGISNYLAWYQQKTGKVPKFLIYEASTLQSGVPSRFSGGGSGTDFTLTISSLQPEDVATYYCQNYNSAPFTFGPGTKVDIKGGGGSGGGGSGGGGSQVQLVESGGGVVQPGRSLRLSCAASGFAFSRYGMHWVRQAPGKGLEWVAVIWYDGSNKYYADSVKGRFTISRDNSKNTQYLQMNSLRAEDTAVYYCARGGDFLYYYYYGMDVWGQGTTVTVSSTREQKLISEEDLAKPTTTPAPRPPTPAPTIASQPLSLRPEACRPAAGGAVHTRGLDFACDIYIWAPLAGTCGVLLLSLVITLYCGRARVKFSRSADAPAYQQGQNQLYNELNLGRREEYDVLDKRRGRDPEMGGKPRRKNPQEGLYNELQKDKMAEAYSEIGMKGERRRGKGHDGLYQGLSTATKDTYDALHMQALPPRSRGSGATNFSLLKQAGDVEENPGPGIHMATYEVLCEVARKLGTDDREVVLFLLNVFIPQPTLAQLIGALRALKEEGRLTFPLLAECLFRAGRRDLLRDLLHLDPRFLERHLAGTMSYFSPYQLTVLHVDGELCARDIRSLIFLSKDTIGSRSTPQTFLHWVYCMENLDLLGPTDVDALMSMLRSLSRVDLQRQVQTLMGLHLSGPSHSQHYRHTPLETDFYDYKDDDDKTSGSGEGRGSLLTCGDVEENPGPHMTEYKPTVRLATRDDVPRAVRTLAAAFADYPATRHTVDPDRHIERVTELQELFLTRVGLDIGKVWVADDGAAVAVWTTPESVEAGAVFAEIGPRMAELSGSRLAAQQQMEGLLAPHRPKEPAWFLATVGVSPDHQGKGLGSAVVLPGVEAAERAGVPAFLETSAPRNLPFYERLGFTVTADVEVPEGPRTWCMTRKPGA

SEQ ID NO: 2887 - protein, 909 aa, Artificial Sequence
  Synthetic Polypeptide
MALPVTALLLPLALLLHAARPDIQMTQSPSSLSTSVGDRVTLTCKASQDVGTAVDWYQQKPGPSPKLLIYWASTRHTGIPSRFSGSGSGTDFTLTISSLQPEDFADYYCQQYNSYPLTFGPGTKVDIKGGGGSGGGGSGGGGSEVQLVQSGPEVKKPGATVKISCKTSGYTFTEYTIHWVKQAPGKGLEWIGNINPNNGGTTYNQKFEDKATLTVDKSTDTAYMELSSLRSEDTAVYYCAAGWNFDYWGQGTLLTVSSTREQKLISEEDLAKPTTTPAPRPPTPAPTIASQPLSLRPEACRPAAGGAVHTRGLDFACDIYIWAPLAGTCGVLLLSLVITLYCGRARVKFSRSADAPAYQQGQNQLYNELNLGRREEYDVLDKRRGRDPEMGGKPRRKNPQEGLYNELQKDKMAEAYSEIGMKGERRRGKGHDGLYQGLSTATKDTYDALHMQALPPRSRGSGATNFSLLKQAGDVEENPGPGIHMATYEVLCEVARKLGTDDREVVLFLLNVFIPQPTLAQLIGALRALKEEGRLTFPLLAECLFRAGRRDLLRDLLHLDPRFLERHLAGTMSYFSPYQLTVLHVDGELCARDIRSLIFLSKDTIGSRSTPQTFLHWVYCMENLDLLGPTDVDALMSMLRSLSRVDLQRQVQTLMGLHLSGPSHSQHYRHTPLETDFYDYKDDDDKTSGSGEGRGSLLTCGDVEENPGPHMTEYKPTVRLATRDDVPRAVRTLAAAFADYPATRHTVDPDRHIERVTELQELFLTRVGLDIGKVWVADDGAAVAVWTTPESVEAGAVFAEIGPRMAELSGSRLAAQQQMEGLLAPHRPKEPAWFLATVGVSPDHQGKGLGSAVVLPGVEAAERAGVPAFLETSAPRNLPFYERLGFTVTADVEVPEGPRTWCMTRKPGA

SEQ ID NO: 2888 - protein, 910 aa, Artificial Sequence
  Synthetic Polypeptide
MALPVTALLLPLALLLHAARPDIQMTQSPSSLSASVGDRVTITCKASQDIYPYLNWFQQKPGKAPKTLIYRTNRLLDGVPSRFSGSGSGTDFTFTISSLQPYYCLQYDEFPLTFGAGTKLEIKRGGGGSGGGGSGGGGSQITLKESGPTLVKPTQTLTLTCTFSGFSLSTSNMGVGWIRQPPGKALEWLAHIWWDDDKYYSPSLKSRLTITKDTSKNQVVLTMTNMDPVDTATYYCVRSNYGYAWFAYWGQGTLVTVSSTREQKLISEEDLAKPTTTPAPRPPTPAPTIASQPLSLRPEACRPAAGGAVHTRGLDFACDIYIWAPLAGTCGVLLLSLVITLYCGRARVKFSRSADAPAYQQGQNQLYNELNLGRREEYDVLDKRRGRDPEMGGKPRRKNPQEGLYNELQKDKMAEAYSEIGMKGERRRGKGHDGLYQGLSTATKDTYDALHMQALPPRSRGSGATNFSLLKQAGDVEENPGPGIHMATYEVLCEVARKLGTDDREVVLFLLNVFIPQPTLAQLIGALRALKEEGRLTFPLLAECLFRAGRRDLLRDLLHLDPRFLERHLAGTMSYFSPYQLTVLHVDGELCARDIRSLIFLSKDTIGSRSTPQTFLHWVYCMENLDLLGPTDVDALMSMLRSLSRVDLQRQVQTLMGLHLSGPSHSQHYRHTPLETDFYDYKDDDDKTSGSGEGRGSLLTCGDVEENPGPHMTEYKPTVRLATRDDVPRAVRTLAAAFADYPATRHTVDPDRHIERVTELQELFLTRVGLDIGKVWVADDGAAVAVWTTPESVEAGAVFAEIGPRMAELSGSRLAAQQQMEGLLAPHRPKEPAWFLATVGVSPDHQGKGLGSAVVLPGVEAAERAGVPAFLETSAPRNLPFYERLGFTVTADVEVPEGPRTWCMTRKPGA

SEQ ID NO: 2889 - protein, 910 aa, Artificial Sequence
  Synthetic Polypeptide
MALPVTALLLPLALLLHAARPDIVMTQSQKFMSTSVGDRVNVTCKASQNVGTNVVWYQQKTGQSPKALIHSASYRYSGVPDRFTGSGSGTDFTLTLSNVQSEDLAEYFCQHYNSFPYTFGGGTKLEIKRGGGGSGGGGSGGGGSQVQLQQSGAELVRPGVSVKISCKGSGYRFTDYPIHWVKQSHAKSLEWIGIISTYYGDVTNNPKFRGKATMTVDKSSTTAYMELARLTSEDSAIYYCARNDLFAYWGQGTLVTVSATREQKLISEEDLAKPTTTPAPRPPTPAPTIASQPLSLRPEACRPAAGGAVHTRGLDFACDIYIWAPLAGTCGVLLLSLVITLYCGRARVKFSRSADAPAYQQGQNQLYNELNLGRREEYDVLDKRRGRDPEMGGKPRRKNPQEGLYNELQKDKMAEAYSEIGMKGERRRGKGHDGLYQGLSTATKDTYDALHMQALPPRSRGSGATNFSLLKQAGDVEENPGPGIHMATYEVLCEVARKLGTDDREVVLFLLNVFIPQPTLAQLIGALRALKEEGRLTFPLLAECLFRAGRRDLLRDLLHLDPRFLERHLAGTMSYFSPYQLTVLHVDGELCARDIRSLIFLSKDTIGSRSTPQTFLHWVYCMENLDLLGPTDVDALMSMLRSLSRVDLQRQVQTLMGLHLSGPSHSQHYRHTPLETDFYDYKDDDDKTSGSGEGRGSLLTCGDVEENPGPHMTEYKPTVRLATRDDVPRAVRTLAAAFADYPATRHTVDPDRHIERVTELQELFLTRVGLDIGKVWVADDGAAVAVWTTPESVEAGAVFAEIGPRMAELSGSRLAAQQQMEGLLAPHRPKEPAWFLATVGVSPDHQGKGLGSAVVLPGVEAAERAGVPAFLETSAPRNLPFYERLGFTVTADVEVPEGPRTWCMTRKPGA

SEQ ID NO: 2890 - protein, 913 aa, Artificial Sequence
  Synthetic Polypeptide
MALPVTALLLPLALLLHAARPDIKMTQSPSSMYASLGERVTITCKASPDINSYLSWFQQKPGKSPKTLIYRANRLVDGVPSRFSGGGSGQDYSLTINSLEYEDMGIYYCLQYDEFPYTFGGGTKLEMKGGGGSGGGGSGGGGSEVKLVESGGGLVKPGGSLKLSCAASGFTFSSYAMSWVRQIPEKRLEWVASISRGGTTYYPDSVKGRFTISRDNVRNILYLQMSSLRSEDTAMYYCGRYDYDGYYAMDYWGQGTSVTVSSTREQKLISEEDLAKPTTTPAPRPPTPAPTIASQPLSLRPEACRPAAGGAVHTRGLDFACDIYIWAPLAGTCGVLLLSLVITLYCGRARVKFSRSADAPAYQQGQNQLYNELNLGRREEYDVLDKRRGRDPEMGGKPRRKNPQEGLYNELQKDKMAEAYSEIGMKGERRRGKGHDGLYQGLSTATKDTYDALHMQALPPRSRGSGATNFSLLKQAGDVEENPGPGIHMATYEVLCEVARKLGTDDREVVLFLLNVFIPQPTLAQLIGALRALKEEGRLTFPLLAECLFRAGRRDLLRDLLHLDPRFLERHLAGTMSYFSPYQLTVLHVDGELCARDIRSLIFLSKDTIGSRSTPQTFLHWVYCMENLDLLGPTDVDALMSMLRSLSRVDLQRQVQTLMGLHLSGPSHSQHYRHTPLETDFYDYKDDDDKTSGSGEGRGSLLTCGDVEENPGPHMTEYKPTVRLATRDDVPRAVRTLAAAFADYPATRHTVDPDRHIERVTELQELFLTRVGLDIGKVWVADDGAAVAVWTTPESVEAGAVFAEIGPRMAELSGSRLAAQQQMEGLLAPHRPKEPAWFLATVGVSPDHQGKGLGSAVVLPGVEAAERAGVPAFLETSAPRNLPFYERLGFTVTADVEVPEGPRTWCMTRKPGA

SEQ ID NO: 2891 - protein, 916 aa, Artificial Sequence
  Synthetic Polypeptide
MALPVTALLLPLALLLHAARPDDVVVTPVSCFLSCISGAEGHHLIQGQQKCQYIWLLYALEPTETRTATQTPHLSCIQPRIWGPCQVQWQWVWDRLHPQHPSCGGGGCCNLLLSAHGAYTFGGGTRLELKGGGGSGGGGSGGGGSEVKLQESGPELVKPGASVKMSCKASGYTFTSYVMHWVKQKPGQGLEWIGYINPYNDGTKYNEKFKGKATLTSDKSSSTAYMELSSLTSEDSAVYYCARWKIYYGNYEDYWGQGTPLTVSSTREQKLISEEDLAKPTTTPAPRPPTPAPTIASQPLSLRPEACRPAAGGAVHTRGLDFACDIYIWAPLAGTCGVLLLSLVITLYCGRARVKFSRSADAPAYQQGQNQLYNELNLGRREEYDVLDKRRGRDPEMGGKPRRKNPQEGLYNELQKDKMAEAYSEIGMKGERRRGKGHDGLYQGLSTATKDTYDALHMQALPPRSRGSGATNFSLLKQAGDVEENPGPGIHMATYEVLCEVARKLGTDDREVVLFLLNVFIPQPTLAQLIGALRALKEEGRLTFPLLAECLFRAGRRDLLRDLLHLDPRFLERHLAGTMSYFSPYQLTVLHVDGELCARDIRSLIFLSKDTIGSRSTPQTFLHWVYCMENLDLLGPTDVDALMSMLRSLSRVDLQRQVQTLMGLHLSGPSHSQHYRHTPLETDFYDYKDDDDKTSGSGEGRGSLLTCGDVEENPGPHMTEYKPTVRLATRDDVPRAVRTLAAAFADYPATRHTVDPDRHIERVTELQELFLTRVGLDIGKVWVADDGAAVAVWTTPESVEAGAVFAEIGPRMAELSGSRLAAQQQMEGLLAPHRPKEPAWFLATVGVSPDHQGKGLGSAVVLPGVEAAERAGVPAFLETSAPRNLPFYERLGFTVTADVEVPEGPRTWCMTRKPGA

SEQ ID NO: 2892 - protein, 946 aa, Artificial Sequence
  Synthetic Polypeptide
MALPVTALLLPLALLLHAARPDEFQVQLVQSGGGLVQPGGSLRLSCAASDFDFAAYEMSWVRQAPGQGLEWVAIISHDGIDKYYTDSVKGRFTISRDNSKNTLYLQMNTLRAEDTATYYCLRLGAVGQGTLVTVSSLEGGGGSGGGGSGGGGSGSGGSGSGGSGSGGSGSGGSFEQVQLVQSGGGLVQPGGSLRLSCAASDFAFDDYEMSWVRQAPGKALEWIGDINHSGTTIYNPSLKSRVTISRDNSKNTLYLQMNTLRAEDTAIYYCARPHYGDYSDAFDIWGQGTMVTVSSTREQKLISEEDLAKPTTTPAPRPPTPAPTIASQPLSLRPEACRPAAGGAVHTRGLDFACDIYIWAPLAGTCGVLLLSLVITLYCGRARVKFSRSADAPAYQQGQNQLYNELNLGRREEYDVLDKRRGRDPEMGGKPRRKNPQEGLYNELQKDKMAEAYSEIGMKGERRRGKGHDGLYQGLSTATKDTYDALHMQALPPRSRGSGATNFSLLKQAGDVEENPGPGIHMATYEVLCEVARKLGTDDREVVLFLLNVFIPQPTLAQLIGALRALKEEGRLTFPLLAECLFRAGRRDLLRDLLHLDPRFLERHLAGTMSYFSPYQLTVLHVDGELCARDIRSLIFLSKDTIGSRSTPQTFLHWVYCMENLDLLGPTDVDALMSMLRSLSRVDLQRQVQTLMGLHLSGPSHSQHYRHTPLETDFYDYKDDDDKTSGSGEGRGSLLTCGDVEENPGPHMTEYKPTVRLATRDDVPRAVRTLAAAFADYPATRHTVDPDRHIERVTELQELFLTRVGLDIGKVWVADDGAAVAVWTTPESVEAGAVFAEIGPRMAELSGSRLAAQQQMEGLLAPHRPKEPAWFLATVGVSPDHQGKGLGSAVVLPGVEAAERAGVPAFLETSAPRNLPFYERLGFTVTADVEVPEGPRTWCMTRKPGA

SEQ ID NO: 2893 - protein, 921 aa, Artificial Sequence
  Synthetic Polypeptide
MALPVTALLLPLALLLHAARPEIVMTQSPATLSVSPGERATLSCRASQSVSSNLAWYQQKPGQAPRLLIYGASTRATGIPARFSGSGSGTDFTLTISSLQSVDSAVYYCQQYNNWPPYTFGQGTKLEIKGGGGSGGGGSGGGGSQVQLLESGGGVVQPGRSLRLSCAASGFTFSFYGMHWVRQAPGKGLEWVAAISYDGSNKYYADSVKGRFTISRDNSKNTLYLQMNSLRAEDTAVYYCAKRPNQFYCSDGRCYSIDYWGQGTLVTVSSTREQKLISEEDLAKPTTTPAPRPPTPAPTIASQPLSLRPEACRPAAGGAVHTRGLDFACDIYIWAPLAGTCGVLLLSLVITLYCGRARVKFSRSADAPAYQQGQNQLYNELNLGRREEYDVLDKRRGRDPEMGGKPRRKNPQEGLYNELQKDKMAEAYSEIGMKGERRRGKGHDGLYQGLSTATKDTYDALHMQALPPRSRGSGATNFSLLKQAGDVEENPGPGIHMATYEVLCEVARKLGTDDREVVLFLLNVFIPQPTLAQLIGALRALKEEGRLTFPLLAECLFRAGRRDLLRDLLHLDPRFLERHLAGTMSYFSPYQLTVLHVDGELCARDIRSLIFLSKDTIGSRSTPQTFLHWVYCMENLDLLGPTDVDALMSMLRSLSRVDLQRQVQTLMGLHLSGPSHSQHYRHTPLETDFYDYKDDDDKTSGSGEGRGSLLTCGDVEENPGPHMTEYKPTVRLATRDDVPRAVRTLAAAFADYPATRHTVDPDRHIERVTELQELFLTRVGLDIGKVWVADDGAAVAVWTTPESVEAGAVFAEIGPRMAELSGSRLAAQQQMEGLLAPHRPKEPAWFLATVGVSPDHQGKGLGSAVVLPGVEAAERAGVPAFLETSAPRNLPFYERLGFTVTADVEVPEGPRTWCMTRKPGA

SEQ ID NO: 2894 - protein, 917 aa, Artificial Sequence
  Synthetic Polypeptide
MALPVTALLLPLALLLHAARPQSVLTQPPSASAGGTPGQRVTISCSGSSSNIGSNFVYWYQQLPGTAPKLLIYRNNQRPSGVPDRFSGSRSGTSASLAGLRSEDEADYYCAADSLGGHYVFGTGTKVLGGGGSGGGGSGGGGSQVQLVESGGGSVQPGRSLRLSCEASGFTFEAYAMHWVRQPPGKGLEWVSSINWNSGRIAYADSVKGRFTISRDNARNSLYLQMNSLRLEDTAFYYCAKDIRRFSTGGAEFEYWGQGTLVTVSSTREQKLISEEDLAKPTTTPAPRPPTPAPTIASQPLSLRPEACRPAAGGAVHTRGLDFACDIYIWAPLAGTCGVLLLSLVITLYCGRARVKFSRSADAPAYQQGQNQLYNELNLGRREEYDVLDKRRGRDPEMGGKPRRKNPQEGLYNELQKDKMAEAYSEIGMKGERRRGKGHDGLYQGLSTATKDTYDALHMQALPPRSRGSGATNFSLLKQAGDVEENPGPGIHMATYEVLCEVARKLGTDDREVVLFLLNVFIPQPTLAQLIGALRALKEEGRLTFPLLAECLFRAGRRDLLRDLLHLDPRFLERHLAGTMSYFSPYQLTVLHVDGELCARDIRSLIFLSKDTIGSRSTPQTFLHWVYCMENLDLLGPTDVDALMSMLRSLSRVDLQRQVQTLMGLHLSGPSHSQHYRHTPLETDFYDYKDDDDKTSGSGEGRGSLLTCGDVEENPGPHMTEYKPTVRLATRDDVPRAVRTLAAAFADYPATRHTVDPDRHIERVTELQELFLTRVGLDIGKVWVADDGAAVAVWTTPESVEAGAVFAEIGPRMAELSGSRLAAQQQMEGLLAPHRPKEPAWFLATVGVSPDHQGKGLGSAVVLPGVEAAERAGVPAFLETSAPRNLPFYERLGFTVTADVEVPEGPRTWCMTRKPGA

SEQ ID NO: 2895 - protein, 912 aa, Artificial Sequence
  Synthetic Polypeptide
MALPVTALLLPLALLLHAARPENVLTQSPAIMSASPGEKVTMTCSASSSVSYMHWYQQKSSTSPKLWIYDTSKLASGVPGRFSGSGSGNSYSLTISSMEAEDVATYYCFQGSGYPLTFGAGTKLELKGGGGSGGGGSGGGGSQVQLKESGPGLVAPSQSLSITCTVSGFSLSSQGVYWVRQPPGKGLEWLGAIWAGGSTNYNSALMSRLSISKDNSKSQVFLKMNSLQTDDTAMYYCARVDGYRGYNMDYWGQGTSVTVSSTREQKLISEEDLAKPTTTPAPRPPTPAPTIASQPLSLRPEACRPAAGGAVHTRGLDFACDIYIWAPLAGTCGVLLLSLVITLYCGRARVKFSRSADAPAYQQGQNQLYNELNLGRREEYDVLDKRRGRDPEMGGKPRRKNPQEGLYNELQKDKMAEAYSEIGMKGERRRGKGHDGLYQGLSTATKDTYDALHMQALPPRSRGSGATNFSLLKQAGDVEENPGPGIHMATYEVLCEVARKLGTDDREVVLFLLNVFIPQPTLAQLIGALRALKEEGRLTFPLLAECLFRAGRRDLLRDLLHLDPRFLERHLAGTMSYFSPYQLTVLHVDGELCARDIRSLIFLSKDTIGSRSTPQTFLHWVYCMENLDLLGPTDVDALMSMLRSLSRVDLQRQVQTLMGLHLSGPSHSQHYRHTPLETDFYDYKDDDDKTSGSGEGRGSLLTCGDVEENPGPHMTEYKPTVRLATRDDVPRAVRTLAAAFADYPATRHTVDPDRHIERVTELQELFLTRVGLDIGKVWVADDGAAVAVWTTPESVEAGAVFAEIGPRMAELSGSRLAAQQQMEGLLAPHRPKEPAWFLATVGVSPDHQGKGLGSAVVLPGVEAAERAGVPAFLETSAPRNLPFYERLGFTVTADVEVPEGPRTWCMTRKPGA

SEQ ID NO: 2896 - protein, 916 aa, Artificial Sequence
  Synthetic Polypeptide
MALPVTALLLPLALLLHAARPDDIQMTQSPSSLSASVGDRVTITCRASQSISSYLNWYQQKPGKAPKLLIYDASNLETGVPSRFSGSGSGTDFTFTISSLQPEDIATYYCQQYDNLPLTFGGGTKVDIKRGGGGSGGGGSGGGGSQVQLVESGGGVVQPGRSLRLSCAASGFTFSSYAMHWVRQAPGKGLEWVAVISYDGSNKYYADSVKGRFTISRDNSKNTLYLQMNSLRAEDTAVYYCARAHNSSSWSFDYWGQGTLVTVSSTREQKLISEEDLAKPTTTPAPRPPTPAPTIASQPLSLRPEACRPAAGGAVHTRGLDFACDIYIWAPLAGTCGVLLLSLVITLYCGRARVKFSRSADAPAYQQGQNQLYNELNLGRREEYDVLDKRRGRDPEMGGKPRRKNPQEGLYNELQKDKMAEAYSEIGMKGERRRGKGHDGLYQGLSTATKDTYDALHMQALPPRSRGSGATNFSLLKQAGDVEENPGPGIHMATYEVLCEVARKLGTDDREVVLFLLNVFIPQPTLAQLIGALRALKEEGRLTFPLLAECLFRAGRRDLLRDLLHLDPRFLERHLAGTMSYFSPYQLTVLHVDGELCARDIRSLIFLSKDTIGSRSTPQTFLHWVYCMENLDLLGPTDVDALMSMLRSLSRVDLQRQVQTLMGLHLSGPSHSQHYRHTPLETDFYDYKDDDDKTSGSGEGRGSLLTCGDVEENPGPHMTEYKPTVRLATRDDVPRAVRTLAAAFADYPATRHTVDPDRHIERVTELQELFLTRVGLDIGKVWVADDGAAVAVWTTPESVEAGAVFAEIGPRMAELSGSRLAAQQQMEGLLAPHRPKEPAWFLATVGVSPDHQGKGLGSAVVLPGVEAAERAGVPAFLETSAPRNLPFYERLGFTVTADVEVPEGPRTWCMTRKPGA

SEQ ID NO: 2897 - protein, 925 aa, Artificial Sequence
  Synthetic Polypeptide
MALPVTALLLPLALLLHAARPDDVVMTQSPLSLPVSLGDQASISCRSSQRLVHSNGNTYLHWYLQKPGQSPKLLIYRVSNRFPGVPDRFSGSGSGTDFTLKISRVEAEDLGIYFCSQSTHVPYTFGGGTKLEIKRGGGGSGGGGSGGGGSEVRLQQSGPDLIKPGASVKMSCKASGYTFTGYVMHWVKQRPGQGLEWIGFINPYNDDIQSNERFRGKATLTSDKSSTTAYMELSSLTSEDSAVYYCARGAGYNFDGAYRFFDFWGQGTTLTVSSTREQKLISEEDLAKPTTTPAPRPPTPAPTIASQPLSLRPEACRPAAGGAVHTRGLDFACDIYIWAPLAGTCGVLLLSLVITLYCGRARVKFSRSADAPAYQQGQNQLYNELNLGRREEYDVLDKRRGRDPEMGGKPRRKNPQEGLYNELQKDKMAEAYSEIGMKGERRRGKGHDGLYQGLSTATKDTYDALHMQALPPRSRGSGATNFSLLKQAGDVEENPGPGIHMATYEVLCEVARKLGTDDREVVLFLLNVFIPQPTLAQLIGALRALKEEGRLTFPLLAECLFRAGRRDLLRDLLHLDPRFLERHLAGTMSYFSPYQLTVLHVDGELCARDIRSLIFLSKDTIGSRSTPQTFLHWVYCMENLDLLGPTDVDALMSMLRSLSRVDLQRQVQTLMGLHLSGPSHSQHYRHTPLETDFYDYKDDDDKTSGSGEGRGSLLTCGDVEENPGPHMTEYKPTVRLATRDDVPRAVRTLAAAFADYPATRHTVDPDRHIERVTELQELFLTRVGLDIGKVWVADDGAAVAVWTTPESVEAGAVFAEIGPRMAELSGSRLAAQQQMEGLLAPHRPKEPAWFLATVGVSPDHQGKGLGSAVVLPGVEAAERAGVPAFLETSAPRNLPFYERLGFTVTADVEVPEGPRTWCMTRKPGA

SEQ ID NO: 2898 - protein, 916 aa, Artificial Sequence
  Synthetic Polypeptide
MALPVTALLLPLALLLHAARPDSYELTQPPSVSVSPGQTATISCSGDQLGGKYGHWYQKKPGQSPVLVLYQDRKRPAGIPERFSGSSSGNTITLTISGTQAVDEADYYCQAWDTNLGGVFGGGTKVTVLGQGGGGSGGGGSGGGGSQVQLVESGAEVKKPGASVKVSCKASGYTFTGYYMHWVRQAPGQGLEWMGRINPNSGGTNYAQKFQGRVTMTRDTSISTAYMELSRLRSDDTAVYYCASPRGRGSAFDIWGQGTLVTVSSTREQKLISEEDLAKPTTTPAPRPPTPAPTIASQPLSLRPEACRPAAGGAVHTRGLDFACDIYIWAPLAGTCGVLLLSLVITLYCGRARVKFSRSADAPAYQQGQNQLYNELNLGRREEYDVLDKRRGRDPEMGGKPRRKNPQEGLYNELQKDKMAEAYSEIGMKGERRRGKGHDGLYQGLSTATKDTYDALHMQALPPRSRGSGATNFSLLKQAGDVEENPGPGIHMATYEVLCEVARKLGTDDREVVLFLLNVFIPQPTLAQLIGALRALKEEGRLTFPLLAECLFRAGRRDLLRDLLHLDPRFLERHLAGTMSYFSPYQLTVLHVDGELCARDIRSLIFLSKDTIGSRSTPQTFLHWVYCMENLDLLGPTDVDALMSMLRSLSRVDLQRQVQTLMGLHLSGPSHSQHYRHTPLETDFYDYKDDDDKTSGSGEGRGSLLTCGDVEENPGPHMTEYKPTVRLATRDDVPRAVRTLAAAFADYPATRHTVDPDRHIERVTELQELFLTRVGLDIGKVWVADDGAAVAVWTTPESVEAGAVFAEIGPRMAELSGSRLAAQQQMEGLLAPHRPKEPAWFLATVGVSPDHQGKGLGSAVVLPGVEAAERAGVPAFLETSAPRNLPFYERLGFTVTADVEVPEGPRTWCMTRKPGA

SEQ ID NO: 2899 - protein, 919 aa, Artificial Sequence
  Synthetic Polypeptide
MALPVTALLLPLALLLHAARPDNFMLTQPHSVSESPGKTVTISCTRSSGSIASKYVQWYQQRPGSSPTTVIYEDNQRPSGVPDRFSGSIDTSSNSASLTISGLRTEDEADYYCHSYDSNNHSVFGGGTKVTVLGQGGGGSGGGGSGGGGSEVQLVESGGGVVQPGGSLRLSCAASGFTFSSYAMSWVRQAPGKGLEWVSAISGSGGSTYYADSVKGRFSISRDNSKNTLYLQMNSLRAEDTAVYYCARTRSSGAFDIWGQGTLVTVSSTREQKLISEEDLAKPTTTPAPRPPTPAPTIASQPLSLRPEACRPAAGGAVHTRGLDFACDIYIWAPLAGTCGVLLLSLVITLYCGRARVKFSRSADAPAYQQGQNQLYNELNLGRREEYDVLDKRRGRDPEMGGKPRRKNPQEGLYNELQKDKMAEAYSEIGMKGERRRGKGHDGLYQGLSTATKDTYDALHMQALPPRSRGSGATNFSLLKQAGDVEENPGPGIHMATYEVLCEVARKLGTDDREVVLFLLNVFIPQPTLAQLIGALRALKEEGRLTFPLLAECLFRAGRRDLLRDLLHLDPRFLERHLAGTMSYFSPYQLTVLHVDGELCARDIRSLIFLSKDTIGSRSTPQTFLHWVYCMENLDLLGPTDVDALMSMLRSLSRVDLQRQVQTLMGLHLSGPSHSQHYRHTPLETDFYDYKDDDDKTSGSGEGRGSLLTCGDVEENPGPHMTEYKPTVRLATRDDVPRAVRTLAAAFADYPATRHTVDPDRHIERVTELQELFLTRVGLDIGKVWVADDGAAVAVWTTPESVEAGAVFAEIGPRMAELSGSRLAAQQQMEGLLAPHRPKEPAWFLATVGVSPDHQGKGLGSAVVLPGVEAAERAGVPAFLETSAPRNLPFYERLGFTVTADVEVPEGPRTWCMTRKPGA

SEQ ID NO: 2900 - protein, 914 aa, Artificial Sequence
  Synthetic Polypeptide
MALPVTALLLPLALLLHAARPDIQMNQSPSSLSASLGDTITITCHASQNINVWLSWYQQKPGNIPKLLIYKASNLHTGVPSRFSGSGSGTGFTITISSLQPEDIATYYCQQGQSYPWTFGGGTKLEIKRGGGGSGGGGSGGGGSEVQLQQSGPELVKPGASVKISCKASGYSFTGYFMNWVKQSHGKSLEYIGRFNPYNGETLYNQKFKGKATLTVDKSSSTVHMELLSVTSEDSAVYYCGRSGNDDAMDYWGQGTSVTVSSATREQKLISEEDLAKPTTTPAPRPPTPAPTIASQPLSLRPEACRPAAGGAVHTRGLDFACDIYIWAPLAGTCGVLLLSLVITLYCGRARVKFSRSADAPAYQQGQNQLYNELNLGRREEYDVLDKRRGRDPEMGGKPRRKNPQEGLYNELQKDKMAEAYSEIGMKGERRRGKGHDGLYQGLSTATKDTYDALHMQALPPRSRGSGATNFSLLKQAGDVEENPGPGIHMATYEVLCEVARKLGTDDREVVLFLLNVFIPQPTLAQLIGALRALKEEGRLTFPLLAECLFRAGRRDLLRDLLHLDPRFLERHLAGTMSYFSPYQLTVLHVDGELCARDIRSLIFLSKDTIGSRSTPQTFLHWVYCMENLDLLGPTDVDALMSMLRSLSRVDLQRQVQTLMGLHLSGPSHSQHYRHTPLETDFYDYKDDDDKTSGSGEGRGSLLTCGDVEENPGPHMTEYKPTVRLATRDDVPRAVRTLAAAFADYPATRHTVDPDRHIERVTELQELFLTRVGLDIGKVWVADDGAAVAVWTTPESVEAGAVFAEIGPRMAELSGSRLAAQQQMEGLLAPHRPKEPAWFLATVGVSPDHQGKGLGSAVVLPGVEAAERAGVPAFLETSAPRNLPFYERLGFTVTADVEVPEGPRTWCMTRKPGA

SEQ ID NO: 2901 - protein, 915 aa, Artificial Sequence
  Synthetic Polypeptide
MALPVTALLLPLALLLHAARPDDIQMTQSPSILSASVGDRVTITCRASQRFGDYLAWYQQKPGQAPKLLIYGASTLQSGVPSRFSGSGSGTEFTLTISGLQPEDFATYYCQQANSFPITFGKGTRLDIRRGGGGSGGGGSGGGGSQVQLVQSGAEVKKPGSSVKVSCKASGGTFSSYAISWVRQAPGQGLEWMGWINVGNGNAIYSQKFQGRVTITRDTSATTAYMELSSLRSEDTAVYYCARDGERAWDLDYWGQGTLVTVSSTREQKLISEEDLAKPTTTPAPRPPTPAPTIASQPLSLRPEACRPAAGGAVHTRGLDFACDIYIWAPLAGTCGVLLLSLVITLYCGRARVKFSRSADAPAYQQGQNQLYNELNLGRREEYDVLDKRRGRDPEMGGKPRRKNPQEGLYNELQKDKMAEAYSEIGMKGERRRGKGHDGLYQGLSTATKDTYDALHMQALPPRSRGSGATNFSLLKQAGDVEENPGPGIHMATYEVLCEVARKLGTDDREVVLFLLNVFIPQPTLAQLIGALRALKEEGRLTFPLLAECLFRAGRRDLLRDLLHLDPRFLERHLAGTMSYFSPYQLTVLHVDGELCARDIRSLIFLSKDTIGSRSTPQTFLHWVYCMENLDLLGPTDVDALMSMLRSLSRVDLQRQVQTLMGLHLSGPSHSQHYRHTPLETDFYDYKDDDDKTSGSGEGRGSLLTCGDVEENPGPHMTEYKPTVRLATRDDVPRAVRTLAAAFADYPATRHTVDPDRHIERVTELQELFLTRVGLDIGKVWVADDGAAVAVWTTPESVEAGAVFAEIGPRMAELSGSRLAAQQQMEGLLAPHRPKEPAWFLATVGVSPDHQGKGLGSAVVLPGVEAAERAGVPAFLETSAPRNLPFYERLGFTVTADVEVPEGPRTWCMTRKPGA

SEQ ID NO: 2902 - protein, 920 aa, Artificial Sequence
  Synthetic Polypeptide
MALPVTALLLPLALLLHAARPDETTLTQSPGTLSLSPGERATLSCRASQSVSSSYLAWYQQKPGQAPRLLIYGASSRATGIPDRFSGSGSGTDFTLTISRLEPEDFAVYYCQQYGSSPYTFGQGTKLEIKRGGGGSGGGGSGGGGSQVQLVQSGGGVVQPGRSLRLSCAASGFTFSSYAMHWVRQAPGKGLEWVAVISYDGSNKYYADSVKGRFTISRDNSKNTLYLQMNSLRAEDTAVYYCARELRFLEWSSDAFDIWGQGTMVTVSSTREQKLISEEDLAKPTTTPAPRPPTPAPTIASQPLSLRPEACRPAAGGAVHTRGLDFACDIYIWAPLAGTCGVLLLSLVITLYCGRARVKFSRSADAPAYQQGQNQLYNELNLGRREEYDVLDKRRGRDPEMGGKPRRKNPQEGLYNELQKDKMAEAYSEIGMKGERRRGKGHDGLYQGLSTATKDTYDALHMQALPPRSRGSGATNFSLLKQAGDVEENPGPGIHMATYEVLCEVARKLGTDDREVVLFLLNVFIPQPTLAQLIGALRALKEEGRLTFPLLAECLFRAGRRDLLRDLLHLDPRFLERHLAGTMSYFSPYQLTVLHVDGELCARDIRSLIFLSKDTIGSRSTPQTFLHWVYCMENLDLLGPTDVDALMSMLRSLSRVDLQRQVQTLMGLHLSGPSHSQHYRHTPLETDFYDYKDDDDKTSGSGEGRGSLLTCGDVEENPGPHMTEYKPTVRLATRDDVPRAVRTLAAAFADYPATRHTVDPDRHIERVTELQELFLTRVGLDIGKVWVADDGAAVAVWTTPESVEAGAVFAEIGPRMAELSGSRLAAQQQMEGLLAPHRPKEPAWFLATVGVSPDHQGKGLGSAVVLPGVEAAERAGVPAFLETSAPRNLPFYERLGFTVTADVEVPEGPRTWCMTRKPGA

SEQ ID NO: 2903 - protein, 915 aa, Artificial Sequence
  Synthetic Polypeptide
MALPVTALLLPLALLLHAARPEIVLTQSPATLSLSPGERATLSCRASQSVRSYLAWYQQKPGQAPRLLIYDASNRATGIPARFSGSGSGTDFTLTISSLEPEDFAVYYCQQRSNWPPTFGQGTKVEIKGGGGSGGGGSGGGGSQLQVQESGPGLVKPSETLSLTCTVSGGSISNSYFSWGWIRQPPGKGLEWIGSFYYGEKTYYNPSLKSRATISIDTSKSQFSLKLSSVTAADTAVYYCPRGPTMIRGVIDSWGQGTLVTVSSTREQKLISEEDLAKPTTTPAPRPPTPAPTIASQPLSLRPEACRPAAGGAVHTRGLDFACDIYIWAPLAGTCGVLLLSLVITLYCGRARVKFSRSADAPAYQQGQNQLYNELNLGRREEYDVLDKRRGRDPEMGGKPRRKNPQEGLYNELQKDKMAEAYSEIGMKGERRRGKGHDGLYQGLSTATKDTYDALHMQALPPRSRGSGATNFSLLKQAGDVEENPGPGIHMATYEVLCEVARKLGTDDREVVLFLLNVFIPQPTLAQLIGALRALKEEGRLTFPLLAECLFRAGRRDLLRDLLHLDPRFLERHLAGTMSYFSPYQLTVLHVDGELCARDIRSLIFLSKDTIGSRSTPQTFLHWVYCMENLDLLGPTDVDALMSMLRSLSRVDLQRQVQTLMGLHLSGPSHSQHYRHTPLETDFYDYKDDDDKTSGSGEGRGSLLTCGDVEENPGPHMTEYKPTVRLATRDDVPRAVRTLAAAFADYPATRHTVDPDRHIERVTELQELFLTRVGLDIGKVWVADDGAAVAVWTTPESVEAGAVFAEIGPRMAELSGSRLAAQQQMEGLLAPHRPKEPAWFLATVGVSPDHQGKGLGSAVVLPGVEAAERAGVPAFLETSAPRNLPFYERLGFTVTADVEVPEGPRTWCMTRKPGA

SEQ ID NO: 2904 - protein, 912 aa, Artificial Sequence
  Synthetic Polypeptide
MALPVTALLLPLALLLHAARPDIQMTQSPSSLSASVGDRVTITCRASQGISSWLAWYQQKPEKAPKSLIYAASSLQSGVPSRFSGSGSGTDFTLTISSLQPEDFATYYCQQYNSYPYTFGQGTKLEIKGGGGSGGGGSGGGGSQVQLVQSGAEVRKPGSSVKVSCKASGGSFNNYPIFWVRQAPGQGFEWMGRIIPILGITAYAQKFQGRVTITADKSTSTAYMELNSLRSEDTAVYYCAGGDDLDAFDIWGQGTMVSVSSTREQKLISEEDLAKPTTTPAPRPPTPAPTIASQPLSLRPEACRPAAGGAVHTRGLDFACDIYIWAPLAGTCGVLLLSLVITLYCGRARVKFSRSADAPAYQQGQNQLYNELNLGRREEYDVLDKRRGRDPEMGGKPRRKNPQEGLYNELQKDKMAEAYSEIGMKGERRRGKGHDGLYQGLSTATKDTYDALHMQALPPRSRGSGATNFSLLKQAGDVEENPGPGIHMATYEVLCEVARKLGTDDREVVLFLLNVFIPQPTLAQLIGALRALKEEGRLTFPLLAECLFRAGRRDLLRDLLHLDPRFLERHLAGTMSYFSPYQLTVLHVDGELCARDIRSLIFLSKDTIGSRSTPQTFLHWVYCMENLDLLGPTDVDALMSMLRSLSRVDLQRQVQTLMGLHLSGPSHSQHYRHTPLETDFYDYKDDDDKTSGSGEGRGSLLTCGDVEENPGPHMTEYKPTVRLATRDDVPRAVRTLAAAFADYPATRHTVDPDRHIERVTELQELFLTRVGLDIGKVWVADDGAAVAVWTTPESVEAGAVFAEIGPRMAELSGSRLAAQQQMEGLLAPHRPKEPAWFLATVGVSPDHQGKGLGSAVVLPGVEAAERAGVPAFLETSAPRNLPFYERLGFTVTADVEVPEGPRTWCMTRKPGA

SEQ ID NO: 2905 - protein, 924 aa, Artificial Sequence
  Synthetic Polypeptide
MALPVTALLLPLALLLHAARPDIVMTQTPLSLPVTPGEPASISCRSSRSLLDSDDGNTYLDWYLQKPGQSPQLLIYTLSYRASGVPDRFSGSGSGTDFTLKISRVEAEDVGVYYCMQRVEFPITFGQGTRLEIKRGGGGSGGGGSGGGGSQVQLVESGGGVVQPGRSLRLSCAASGFIFSRYGMHWVRQAPGKGLKWVAVIWYDGSNKLYADSVKGRFTISRDNSKNTLYLQMNSLRAEDTAVYYCARDYYDNSRHHWGFDYWGQGTLVTVSSTREQKLISEEDLAKPTTTPAPRPPTPAPTIASQPLSLRPEACRPAAGGAVHTRGLDFACDIYIWAPLAGTCGVLLLSLVITLYCGRARVKFSRSADAPAYQQGQNQLYNELNLGRREEYDVLDKRRGRDPEMGGKPRRKNPQEGLYNELQKDKMAEAYSEIGMKGERRRGKGHDGLYQGLSTATKDTYDALHMQALPPRSRGSGATNFSLLKQAGDVEENPGPGIHMATYEVLCEVARKLGTDDREVVLFLLNVFIPQPTLAQLIGALRALKEEGRLTFPLLAECLFRAGRRDLLRDLLHLDPRFLERHLAGTMSYFSPYQLTVLHVDGELCARDIRSLIFLSKDTIGSRSTPQTFLHWVYCMENLDLLGPTDVDALMSMLRSLSRVDLQRQVQTLMGLHLSGPSHSQHYRHTPLETDFYDYKDDDDKTSGSGEGRGSLLTCGDVEENPGPHMTEYKPTVRLATRDDVPRAVRTLAAAFADYPATRHTVDPDRHIERVTELQELFLTRVGLDIGKVWVADDGAAVAVWTTPESVEAGAVFAEIGPRMAELSGSRLAAQQQMEGLLAPHRPKEPAWFLATVGVSPDHQGKGLGSAVVLPGVEAAERAGVPAFLETSAPRNLPFYERLGFTVTADVEVPEGPRTWCMTRKPGA

SEQ ID NO: 2906 - protein, 914 aa, Artificial Sequence
  Synthetic Polypeptide
MALPVTALLLPLALLLHAARPEIQMTQSPSSMSASLGDTITITCQATQDIFKNLNWYQQKPGKPPSLLIYYATELAEGVPSRFSGSGSGSDYSLTISNLESEDFAAYYCLQFFEFPFTFGSGTKLEMKGGGGSGGGGSGGGGSQVQLQQSGAELVRPGTSVKVSCKASGYVFTNYWIEWIKQRPGQGLEWIGVMNPGSGETTYNEKFKGKATLTADKSSSTAYMQLSSLTSVDSAVYFCARDHDRDYYAMDYWGQGTSVTVSSTREQKLISEEDLAKPTTTPAPRPPTPAPTIASQPLSLRPEACRPAAGGAVHTRGLDFACDIYIWAPLAGTCGVLLLSLVITLYCGRARVKFSRSADAPAYQQGQNQLYNELNLGRREEYDVLDKRRGRDPEMGGKPRRKNPQEGLYNELQKDKMAEAYSEIGMKGERRRGKGHDGLYQGLSTATKDTYDALHMQALPPRSRGSGATNFSLLKQAGDVEENPGPGIHMATYEVLCEVARKLGTDDREVVLFLLNVFIPQPTLAQLIGALRALKEEGRLTFPLLAECLFRAGRRDLLRDLLHLDPRFLERHLAGTMSYFSPYQLTVLHVDGELCARDIRSLIFLSKDTIGSRSTPQTFLHWVYCMENLDLLGPTDVDALMSMLRSLSRVDLQRQVQTLMGLHLSGPSHSQHYRHTPLETDFYDYKDDDDKTSGSGEGRGSLLTCGDVEENPGPHMTEYKPTVRLATRDDVPRAVRTLAAAFADYPATRHTVDPDRHIERVTELQELFLTRVGLDIGKVWVADDGAAVAVWTTPESVEAGAVFAEIGPRMAELSGSRLAAQQQMEGLLAPHRPKEPAWFLATVGVSPDHQGKGLGSAVVLPGVEAAERAGVPAFLETSAPRNLPFYERLGFTVTADVEVPEGPRTWCMTRKPGA

SEQ ID NO: 2907 - protein, 911 aa, Artificial Sequence
  Synthetic Polypeptide
MALPVTALLLPLALLLHAARPDILLTQSPAILSVSPGERVSFSCRASQNIGTSIHWYQQRTNGSPRLLIKYASESVSGIPSRFSGSGSGTDFTLSINSVESEDIADYYCQHTNSWPTTFGGGTKLEIKRGGGGSGGGGSGGGGSQVQLQQSDAELVKPGASVKISCKASGYTFTDHAIHWVKQKPEQGLEWIGYFSPGNGDIKYNEKFKGKATLTADKSSSTAYMQLNSLTSEDSAVYFCKRSYGNYDYWGQGTTLTVSSTREQKLISEEDLAKPTTTPAPRPPTPAPTIASQPLSLRPEACRPAAGGAVHTRGLDFACDIYIWAPLAGTCGVLLLSLVITLYCGRARVKFSRSADAPAYQQGQNQLYNELNLGRREEYDVLDKRRGRDPEMGGKPRRKNPQEGLYNELQKDKMAEAYSEIGMKGERRRGKGHDGLYQGLSTATKDTYDALHMQALPPRSRGSGATNFSLLKQAGDVEENPGPGIHMATYEVLCEVARKLGTDDREVVLFLLNVFIPQPTLAQLIGALRALKEEGRLTFPLLAECLFRAGRRDLLRDLLHLDPRFLERHLAGTMSYFSPYQLTVLHVDGELCARDIRSLIFLSKDTIGSRSTPQTFLHWVYCMENLDLLGPTDVDALMSMLRSLSRVDLQRQVQTLMGLHLSGPSHSQHYRHTPLETDFYDYKDDDDKTSGSGEGRGSLLTCGDVEENPGPHMTEYKPTVRLATRDDVPRAVRTLAAAFADYPATRHTVDPDRHIERVTELQELFLTRVGLDIGKVWVADDGAAVAVWTTPESVEAGAVFAEIGPRMAELSGSRLAAQQQMEGLLAPHRPKEPAWFLATVGVSPDHQGKGLGSAVVLPGVEAAERAGVPAFLETSAPRNLPFYERLGFTVTADVEVPEGPRTWCMTRKPGA

SEQ ID NO: 2908 - protein, 916 aa, Artificial Sequence
  Synthetic Polypeptide
MALPVTALLLPLALLLHAARPDIVMTQSPDSLAVSLGERATINCKSSQSLLNSGDQKNYLTWYQQKPGQPPKLLIYWASTRESGVPDRFSGSGSGTDFTLTISSLQAEDVAVYYCQNDYSYPLTFGQGTKVEIKGGGGSGGGGSGGGGSQVQLVQSGAEVKKTGSSVKVSCKASGYTFTDHAIHVWRQAPGQALEWMGHFSPGNTDIKYNDKFKGRVTLTVDRSMSTAYMELSSLRSEDTAMYYCKTSTFFFDYWGQGTMVTVSSTREQKLISEEDLAKPTTTPAPRPPTPAPTIASQPLSLRPEACRPAAGGAVHTRGLDFACDIYIWAPLAGTCGVLLLSLVITLYCGRARVKFSRSADAPAYQQGQNQLYNELNLGRREEYDVLDKRRGRDPEMGGKPRRKNPQEGLYNELQKDKMAEAYSEIGMKGERRRGKGHDGLYQGLSTATKDTYDALHMQALPPRSRGSGATNFSLLKQAGDVEENPGPGIHMATYEVLCEVARKLGTDDREVVLFLLNVFIPQPTLAQLIGALRALKEEGRLTFPLLAECLFRAGRRDLLRDLLHLDPRFLERHLAGTMSYFSPYQLTVLHVDGELCARDIRSLIFLSKDTIGSRSTPQTFLHWVYCMENLDLLGPTDVDALMSMLRSLSRVDLQRQVQTLMGLHLSGPSHSQHYRHTPLETDFYDYKDDDDKTSGSGEGRGSLLTCGDVEENPGPHMTEYKPTVRLATRDDVPRAVRTLAAAFADYPATRHTVDPDRHIERVTELQELFLTRVGLDIGKVWVADDGAAVAVWTTPESVEAGAVFAEIGPRMAELSGSRLAAQQQMEGLLAPHRPKEPAWFLATVGVSPDHQGKGLGSAVVLPGVEAAERAGVPAFLETSAPRNLPFYERLGFTVTADVEVPEGPRTWCMTRKPGA

SEQ ID NO: 2909 - protein, 838 aa, Artificial Sequence
  Synthetic Polypeptide
MELTELLLVVMLLLTARLTLSSPAPPACDLRVLSKLLRDSHVLHSRLSQCPEVHPLPTPVLLPAVDFSLGEWKTQMEETKAQDILGAVTLLLEGVMAARGQLGPTCLSSLLGQLSGQVRLLLGALQSLLGTQLPPQGRTTAHKDPNAIFLSFQHLLRGKVRFLMLVGGSTLCVRRAPPTTAVPSRTSTREQKLISEEDLAKPTTTPAPRPPTPAPTIASQPLSLRPEACRPAAGGAVHTRGLDFACDIYIWAPLAGTCGVLLLSLVITLYCGRARVKFSRSADAPAYQQGQNQLYNELNLGRREEYDVLDKRRGRDPEMGGKPRRKNPQEGLYNELQKDKMAEAYSEIGMKGERRRGKGHDGLYQGLSTATKDTYDALHMQALPPRSRGSGATNFSLLKQAGDVEENPGPGIHMATYEVLCEVARKLGTDDREVVLFLLNVFIPQPTLAQLIGALRALKEEGRLTFPLLAECLFRAGRRDLLRDLLHLDPRFLERHLAGTMSYFSPYQLTVLHVDGELCARDIRSLIFLSKDTIGSRSTPQTFLHWVYCMENLDLLGPTDVDALMSMLRSLSRVDLQRQVQTLMGLHLSGPSHSQHYRHTPLETDFYDYKDDDDKTSGSGEGRGSLLTCGDVEENPGPHMTEYKPTVRLATRDDVPRAVRTLAAAFADYPATRHTVDPDRHIERVTELQELFLTRVGLDIGKVWVADDGAAVAVWTTPESVEAGAVFAEIGPRMAELSGSRLAAQQQMEGLLAPHRPKEPAWFLATVGVSPDHQGKGLGSAVVLPGVEAAERAGVPAFLETSAPRNLPFYERLGFTVTADVEVPEGPRTWCMTRKPGA

SEQ ID NO: 2910 - protein, 915 aa, Artificial Sequence
  Synthetic Polypeptide
MALPVTALLLPLALLLHAARPDIQMTQSPSSLSASVGDRVTITCKASQDVSIAVAWYQQKPGKAPKVLIYSASYRYTGVPDRFSGSGSGTDFTFTISSLQPEDIAVYYCQQHYITPLTFGGGTKVEIKGGGGSGGGGSGGGGSQIQLVQSGHEVKKPGASVKVSCKASGYTFTNYGMNWVRQAPGQGLEWMGWINTKTGEPTYAEEFKGRFVFSLETSASTAYLQISSLKAEDTAMYFCGRGGYGSSYWYFDVWGQGTTVTVSSTREQKLISEEDLAKPTTTPAPRPPTPAPTIASQPLSLRPEACRPAAGGAVHTRGLDFACDIYIWAPLAGTCGVLLLSLVITLYCGRARVKFSRSADAPAYQQGQNQLYNELNLGRREEYDVLDKRRGRDPEMGGKPRRKNPQEGLYNELQKDKMAEAYSEIGMKGERRRGKGHDGLYQGLSTATKDTYDALHMQALPPRSRGSGATNFSLLKQAGDVEENPGPGIHMATYEVLCEVARKLGTDDREVVLFLLNVFIPQPTLAQLIGALRALKEEGRLTFPLLAECLFRAGRRDLLRDLLHLDPRFLERHLAGTMSYFSPYQLTVLHVDGELCARDIRSLIFLSKDTIGSRSTPQTFLHWVYCMENLDLLGPTDVDALMSMLRSLSRVDLQRQVQTLMGLHLSGPSHSQHYRHTPLETDFYDYKDDDDKTSGSGEGRGSLLTCGDVEENPGPHMTEYKPTVRLATRDDVPRAVRTLAAAFADYPATRHTVDPDRHIERVTELQELFLTRVGLDIGKVWVADDGAAVAVWTTPESVEAGAVFAEIGPRMAELSGSRLAAQQQMEGLLAPHRPKEPAWFLATVGVSPDHQGKGLGSAVVLPGVEAAERAGVPAFLETSAPRNLPFYERLGFTVTADVEVPEGPRTWCMTRKPGA

SEQ ID NO: 2911 - protein, 917 aa, Artificial Sequence
  Synthetic Polypeptide
MALPVTALLLPLALLLHAARPDIVMTQSPDSLAVSLGERATINCRASKSVSTSGYSYMHWYQQKPGQPPKLLIYLASNLESGVPDRFSGSGSGTDFTLTISSLQAEDVAVYYCQHSRELPYTFGQGTKLEIKGGGGSGGGGSGGGGSQVQLQESGPGLVKPSETLSLTCTVSGGSISSYGVHWIRQPPGKGLEWIGVIWTSGVTDYNSALMGRVTISVDTSKNQFSLKLSSVTAADTAVYYCARDGDYDRYTMDYWGQGTLVTVSSTREQKLISEEDLAKPTTTPAPRPPTPAPTIASQPLSLRPEACRPAAGGAVHTRGLDFACDIYIWAPLAGTCGVLLLSLVITLYCGRARVKFSRSADAPAYQQGQNQLYNELNLGRREEYDVLDKRRGRDPEMGGKPRRKNPQEGLYNELQKDKMAEAYSEIGMKGERRRGKGHDGLYQGLSTATKDTYDALHMQALPPRSRGSGATNFSLLKQAGDVEENPGPGIHMATYEVLCEVARKLGTDDREVVLFLLNVFIPQPTLAQLIGALRALKEEGRLTFPLLAECLFRAGRRDLLRDLLHLDPRFLERHLAGTMSYFSPYQLTVLHVDGELCARDIRSLIFLSKDTIGSRSTPQTFLHWVYCMENLDLLGPTDVDALMSMLRSLSRVDLQRQVQTLMGLHLSGPSHSQHYRHTPLETDFYDYKDDDDKTSGSGEGRGSLLTCGDVEENPGPHMTEYKPTVRLATRDDVPRAVRTLAAAFADYPATRHTVDPDRHIERVTELQELFLTRVGLDIGKVWVADDGAAVAVWTTPESVEAGAVFAEIGPRMAELSGSRLAAQQQMEGLLAPHRPKEPAWFLATVGVSPDHQGKGLGSAVVLPGVEAAERAGVPAFLETSAPRNLPFYERLGFTVTADVEVPEGPRTWCMTRKPGA

SEQ ID NO: 2912 - protein, 896 aa, Artificial Sequence
  Synthetic Polypeptide
MTALFLMSMLFGLACGQAMSFCIPTEYTMHIERRECAYCLTINTTICAGYCMTRDINGKLFLPKYALSQDVCTYRDFIYRTVEIPGCPLHVAPYFSYPVALSCKCGKCNTDYSDCIHEAIKTNYCTKPQKSYLVGFSVGGGGSGGGGSGGGGSAPDVQDCPECTLQENPFFSQPGAPILQCMGCCFSRAYPTPLRSKKTMLVQKNVTSESTCCVAKSYNRVTVMGGFKVENHTACHCSTCYYHKSTREQKLISEEDLAKPTTTPAPRPPTPAPTIASQPLSLRPEACRPAAGGAVHTRGLDFACDIYIWAPLAGTCGVLLLSLVITLYCGRARVKFSRSADAPAYQQGQNQLYNELNLGRREEYDVLDKRRGRDPEMGGKPRRKNPQEGLYNELQKDKMAEAYSEIGMKGERRRGKGHDGLYQGLSTATKDTYDALHMQALPPRSRGSGATNFSLLKQAGDVEENPGPGIHMATYEVLCEVARKLGTDDREVVLFLLNVFIPQPTLAQLIGALRALKEEGRLTFPLLAECLFRAGRRDLLRDLLHLDPRFLERHLAGTMSYFSPYQLTVLHVDGELCARDIRSLIFLSKDTIGSRSTPQTFLHWVYCMENLDLLGPTDVDALMSMLRSLSRVDLQRQVQTLMGLHLSGPSHSQHYRHTPLETDFYDYKDDDDKTSGSGEGRGSLLTCGDVEENPGPHMTEYKPTVRLATRDDVPRAVRTLAAAFADYPATRHTVDPDRHIERVTELQELFLTRVGLDIGKVWVADDGAAVAVWTTPESVEAGAVFAEIGPRMAELSGSRLAAQQQMEGLLAPHRPKEPAWFLATVGVSPDHQGKGLGSAVVLPGVEAAERAGVPAFLETSAPRNLPFYERLGFTVTADVEVPEGPRTWCMTRKPGA

SEQ ID NO: 2913 - protein, 913 aa, Artificial Sequence
  Synthetic Polypeptide
MALPVTALLLPLALLLHAARPQSVLTQPPSVSVSPGQTASITCSGDKLGDKYACWYQQKPGQSPVLVIYQDSKRPSGIPERFSGSNSGNTATLTISGTQAMDEADYYCQAWDSSTAVVFGGGTKLTVLGGGGSGGGGSGGGGSQVQLVQSGAEVKKPGQSLKISCKASGYSLTDNWIGWVRQKPGKGLEWMGIIYPGDSDTRYSPSFQGQVTISADKSINTAYLQWSSLKASDTAIYYCVGLDWNYNPLRYWGPGTLVTVSSTREQKLISEEDLAKPTTTPAPRPPTPAPTIASQPLSLRPEACRPAAGGAVHTRGLDFACDIYIWAPLAGTCGVLLLSLVITLYCGRARVKFSRSADAPAYQQGQNQLYNELNLGRREEYDVLDKRRGRDPEMGGKPRRKNPQEGLYNELQKDKMAEAYSEIGMKGERRRGKGHDGLYQGLSTATKDTYDALHMQALPPRSRGSGATNFSLLKQAGDVEENPGPGIHMATYEVLCEVARKLGTDDREVVLFLLNVFIPQPTLAQLIGALRALKEEGRLTFPLLAECLFRAGRRDLLRDLLHLDPRFLERHLAGTMSYFSPYQLTVLHVDGELCARDIRSLIFLSKDTIGSRSTPQTFLHWVYCMENLDLLGPTDVDALMSMLRSLSRVDLQRQVQTLMGLHLSGPSHSQHYRHTPLETDFYDYKDDDDKTSGSGEGRGSLLTCGDVEENPGPHMTEYKPTVRLATRDDVPRAVRTLAAAFADYPATRHTVDPDRHIERVTELQELFLTRVGLDIGKVWVADDGAAVAVWTTPESVEAGAVFAEIGPRMAELSGSRLAAQQQMEGLLAPHRPKEPAWFLATVGVSPDHQGKGLGSAVVLPGVEAAERAGVPAFLETSAPRNLPFYERLGFTVTADVEVPEGPRTWCMTRKPGA

SEQ ID NO: 2914 - protein, 911 aa, Artificial Sequence
  Synthetic Polypeptide
MALPVTALLLPLALLLHAARPDIVMTQSQKFMSTSVGDRVSIICKASQNVGTFVAWYQQKPGQSPKLLVYSASNRYTGVPDRFTGSGSGTDFTLTINNMQSEDLADYFCRQYSSYPYTFGGGTKLEIKGGGGSGGGGSGGGGSEVQLQQSGPELVKPGASMKISCKASGYSFSAYTMNWVKQSHGKNLEWIGLINPYNGGTNYNQEFEGKATLTVNKSSNTAFMELLSLTSDDSAVYYCARRDWDYFDYWGQGTTLTVSSTREQKLISEEDLAKPTTTPAPRPPTPAPTIASQPLSLRPEACRPAAGGAVHTRGLDFACDIYIWAPLAGTCGVLLLSLVITLYCGRARVKFSRSADAPAYQQGQNQLYNELNLGRREEYDVLDKRRGRDPEMGGKPRRKNPQEGLYNELQKDKMAEAYSEIGMKGERRRGKGHDGLYQGLSTATKDTYDALHMQALPPRSRGSGATNFSLLKQAGDVEENPGPGIHMATYEVLCEVARKLGTDDREVVLFLLNVFIPQPTLAQLIGALRALKEEGRLTFPLLAECLFRAGRRDLLRDLLHLDPRFLERHLAGTMSYFSPYQLTVLHVDGELCARDIRSLIFLSKDTIGSRSTPQTFLHWVYCMENLDLLGPTDVDALMSMLRSLSRVDLQRQVQTLMGLHLSGPSHSQHYRHTPLETDFYDYKDDDDKTSGSGEGRGSLLTCGDVEENPGPHMTEYKPTVRLATRDDVPRAVRTLAAAFADYPATRHTVDPDRHIERVTELQELFLTRVGLDIGKVWVADDGAAVAVWTTPESVEAGAVFAEIGPRMAELSGSRLAAQQQMEGLLAPHRPKEPAWFLATVGVSPDHQGKGLGSAVVLPGVEAAERAGVPAFLETSAPRNLPFYERLGFTVTADVEVPEGPRTWCMTRKPGA

SEQ ID NO: 2915 - protein, 922 aa, Artificial Sequence
  Synthetic Polypeptide
MALPVTALLLPLALLLHAARPAIQMTQSPSSLSASVGDRVTITCRASQSISNYLNWYQQKPGKAPKLLIYAASSLQSGVPSRFSGSGSGTDFTLTISSLQPEDFATYYCQQSYSSPSTTFGQGTKLEIKRGGGGSGGGGSGGGGSEVQLVESGGGLIQPGGSLRLSCAASGFTVSSNYMSWVRQAPGKGLEWVSVTYSGGSTSYADSVKGRFTISRDNSKNTLYLQMNSLRAEDTAVYYCARGGRYCSSISCYARSGCDYWGQGTLVTVSSTREQKLISEEDLAKPTTTPAPRPPTPAPTIASQPLSLRPEACRPAAGGAVHTRGLDFACDIYIWAPLAGTCGVLLLSLVITLYCGRARVKFSRSADAPAYQQGQNQLYNELNLGRREEYDVLDKRRGRDPEMGGKPRRKNPQEGLYNELQKDKMAEAYSEIGMKGERRRGKGHDGLYQGLSTATKDTYDALHMQALPPRSRGSGATNFSLLKQAGDVEENPGPGIHMATYEVLCEVARKLGTDDREVVLFLLNVFIPQPTLAQLIGALRALKEEGRLTFPLLAECLFRAGRRDLLRDLLHLDPRFLERHLAGTMSYFSPYQLTVLHVDGELCARDIRSLIFLSKDTIGSRSTPQTFLHWVYCMENLDLLGPTDVDALMSMLRSLSRVDLQRQVQTLMGLHLSGPSHSQHYRHTPLETDFYDYKDDDDKTSGSGEGRGSLLTCGDVEENPGPHMTEYKPTVRLATRDDVPRAVRTLAAAFADYPATRHTVDPDRHIERVTELQELFLTRVGLDIGKVWVADDGAAVAVWTTPESVEAGAVFAEIGPRMAELSGSRLAAQQQMEGLLAPHRPKEPAWFLATVGVSPDHQGKGLGSAVVLPGVEAAERAGVPAFLETSAPRNLPFYERLGFTVTADVEVPEGPRTWCMTRKPGA

SEQ ID NO: 2916 - protein, 917 aa, Artificial Sequence
  Synthetic Polypeptide
MALPVTALLLPLALLLHAARPDIQMTQSPSSLSASVGDRVTITCRASQSIGTSLHWYQQKPGKAPKLLIKFASRLQSGVPSRFSGSGSGTDFTLTISSLQPEDFATYYCQQSPGFPPTFGQGTKLEIKRGGGGSGGGGSGGGGSQVQLVESGGGLVKPGGSLRLSCAASGFSITTSGYYWTWIRQFPGKGLEWMGYIGYNSKTYYNPALKSRITISRDNAKNSLYLQMNSLRAEDTAVYYCARSLYGGYKDAFDSWGQGTLVTVSSTREQKLISEEDLAKPTTTPAPRPPTPAPTIASQPLSLRPEACRPAAGGAVHTRGLDFACDIYIWAPLAGTCGVLLLSLVITLYCGRARVKFSRSADAPAYQQGQNQLYNELNLGRREEYDVLDKRRGRDPEMGGKPRRKNPQEGLYNELQKDKMAEAYSEIGMKGERRRGKGHDGLYQGLSTATKDTYDALHMQALPPRSRGSGATNFSLLKQAGDVEENPGPGIHMATYEVLCEVARKLGTDDREVVLFLLNVFIPQPTLAQLIGALRALKEEGRLTFPLLAECLFRAGRRDLLRDLLHLDPRFLERHLAGTMSYFSPYQLTVLHVDGELCARDIRSLIFLSKDTIGSRSTPQTFLHWVYCMENLDLLGPTDVDALMSMLRSLSRVDLQRQVQTLMGLHLSGPSHSQHYRHTPLETDFYDYKDDDDKTSGSGEGRGSLLTCGDVEENPGPHMTEYKPTVRLATRDDVPRAVRTLAAAFADYPATRHTVDPDRHIERVTELQELFLTRVGLDIGKVWVADDGAAVAVWTTPESVEAGAVFAEIGPRMAELSGSRLAAQQQMEGLLAPHRPKEPAWFLATVGVSPDHQGKGLGSAVVLPGVEAAERAGVPAFLETSAPRNLPFYERLGFTVTADVEVPEGPRTWCMTRKPGA

SEQ ID NO: 2917 - protein, 922 aa, Artificial Sequence
  Synthetic Polypeptide
MALPVTALLLPLALLLHAARPDEIVLTQSPLSLPVTPGEPASISCRSSQSLLHSIGYNYLDWYLQKPGQSPQLLIYLGSNRASGVPDRFSGSGSGTDFTLKISRVEAEDVGVYYCMQALQTPLTFGGGTKVEIKRGGGGSGGGGSGGGGSEVQLVESGGGVVQPGRSLRLSCAASGFTFRSYGMHWVRQAPGKGLEWVAVISYDGSNKYYTDSVNGRFTISRDNSKNTLYLQMNSLRAEDTAVYYCARGGGYYETSGPDYWGQGTLVTVSSTREQKLISEEDLAKPTTTPAPRPPTPAPTIASQPLSLRPEACRPAAGGAVHTRGLDFACDIYIWAPLAGTCGVLLLSLVITLYCGRARVKFSRSADAPAYQQGQNQLYNELNLGRREEYDVLDKRRGRDPEMGGKPRRKNPQEGLYNELQKDKMAEAYSEIGMKGERRRGKGHDGLYQGLSTATKDTYDALHMQALPPRSRGSGATNFSLLKQAGDVEENPGPGIHMATYEVLCEVARKLGTDDREVVLFLLNVFIPQPTLAQLIGALRALKEEGRLTFPLLAECLFRAGRRDLLRDLLHLDPRFLERHLAGTMSYFSPYQLTVLHVDGELCARDIRSLIFLSKDTIGSRSTPQTFLHWVYCMENLDLLGPTDVDALMSMLRSLSRVDLQRQVQTLMGLHLSGPSHSQHYRHTPLETDFYDYKDDDDKTSGSGEGRGSLLTCGDVEENPGPHMTEYKPTVRLATRDDVPRAVRTLAAAFADYPATRHTVDPDRHIERVTELQELFLTRVGLDIGKVWVADDGAAVAVWTTPESVEAGAVFAEIGPRMAELSGSRLAAQQQMEGLLAPHRPKEPAWFLATVGVSPDHQGKGLGSAVVLPGVEAAERAGVPAFLETSAPRNLPFYERLGFTVTADVEVPEGPRTWCMTRKPGA

SEQ ID NO: 2918 - protein, 920 aa, Artificial Sequence
  Synthetic Polypeptide
MALPVTALLLPLALLLHAARPDDVVMTQSPLSLPVTPGEPASISCRSSQSLLHSIGYNYLHWFLQKPGQSPQLLIYLGSNRASGVPDRFSGSGSGTDFTLKISRVEAEDVGVYYCMQALQTPPTFGQGTRLEIKRGGGGSGGGGSGGGGSQLQLQESGPGLVKPSGTLSLTCAVSGGSISSSNWWSWVRQPPGKGLEWIGEIYHSGSTNYNPSLKSRVTISVDKSKNQFSLKLSSVTAADTAVYYCVGSPYGDYVLDYWGQGTLVTVSSTREQKLISEEDLAKPTTTPAPRPPTPAPTIASQPLSLRPEACRPAAGGAVHTRGLDFACDIYIWAPLAGTCGVLLLSLVITLYCGRARVKFSRSADAPAYQQGQNQLYNELNLGRREEYDVLDKRRGRDPEMGGKPRRKNPQEGLYNELQKDKMAEAYSEIGMKGERRRGKGHDGLYQGLSTATKDTYDALHMQALPPRSRGSGATNFSLLKQAGDVEENPGPGIHMATYEVLCEVARKLGTDDREVVLFLLNVFIPQPTLAQLIGALRALKEEGRLTFPLLAECLFRAGRRDLLRDLLHLDPRFLERHLAGTMSYFSPYQLTVLHVDGELCARDIRSLIFLSKDTIGSRSTPQTFLHWVYCMENLDLLGPTDVDALMSMLRSLSRVDLQRQVQTLMGLHLSGPSHSQHYRHTPLETDFYDYKDDDDKTSGSGEGRGSLLTCGDVEENPGPHMTEYKPTVRLATRDDVPRAVRTLAAAFADYPATRHTVDPDRHIERVTELQELFLTRVGLDIGKVWVADDGAAVAVWTTPESVEAGAVFAEIGPRMAELSGSRLAAQQQMEGLLAPHRPKEPAWFLATVGVSPDHQGKGLGSAVVLPGVEAAERAGVPAFLETSAPRNLPFYERLGFTVTADVEVPEGPRTWCMTRKPGA

SEQ ID NO: 2919 - protein, 923 aa, Artificial Sequence
  Synthetic Polypeptide
MALPVTALLLPLALLLHAARPDVVMTQSPLSLPVTPGEPASISCRSSQSLLHSNGHNYLDWYLQKPGQSPQLLIYLGSNRASGVPDRFSGSGSGTDFTLKISRVEAEDVGVYYCMQTLQTPLTFGPGTKVDIKRGGGGSGGGGSGGGGSEVQLVETGGGVVQPGRSLRLSCAASGFTFSSYGMHWVRQAPGKGLEWVAVISYDGSNKYYADSVKGRFTISRDNSKNTLYLQMNSLRAEDTAVYYCAKDRYGWGSSFGHFDYWGQGTLVTVSSTREQKLISEEDLAKPTTTPAPRPPTPAPTIASQPLSLRPEACRPAAGGAVHTRGLDFACDIYIWAPLAGTCGVLLLSLVITLYCGRARVKFSRSADAPAYQQGQNQLYNELNLGRREEYDVLDKRRGRDPEMGGKPRRKNPQEGLYNELQKDKMAEAYSEIGMKGERRRGKGHDGLYQGLSTATKDTYDALHMQALPPRSRGSGATNFSLLKQAGDVEENPGPGIHMATYEVLCEVARKLGTDDREVVLFLLNVFIPQPTLAQLIGALRALKEEGRLTFPLLAECLFRAGRRDLLRDLLHLDPRFLERHLAGTMSYFSPYQLTVLHVDGELCARDIRSLIFLSKDTIGSRSTPQTFLHWVYCMENLDLLGPTDVDALMSMLRSLSRVDLQRQVQTLMGLHLSGPSHSQHYRHTPLETDFYDYKDDDDKTSGSGEGRGSLLTCGDVEENPGPHMTEYKPTVRLATRDDVPRAVRTLAAAFADYPATRHTVDPDRHIERVTELQELFLTRVGLDIGKVWVADDGAAVAVWTTPESVEAGAVFAEIGPRMAELSGSRLAAQQQMEGLLAPHRPKEPAWFLATVGVSPDHQGKGLGSAVVLPGVEAAERAGVPAFLETSAPRNLPFYERLGFTVTADVEVPEGPRTWCMTRKPGA

SEQ ID NO: 2920 - protein, 918 aa, Artificial Sequence
  Synthetic Polypeptide
MALPVTALLLPLALLLHAARPDEIVLTQSPGTLSLSLGERATLSCRASQSISSSFLAWYQQKPGQAPKLLIYAASTRATGIPDRFSGSGSGTDFTLTISRLEPEDFAVYYCQQYGRSLSFGGGTKVEVKGGGGSGGGGSGGGGSQVQLQQSGPGLVKPSQTLSLTCAISGDSVSGNSATWNWIRQSPSRGLEWLGRTYYRSKWNHDYAESVKSRITINPDTSKNQFSLQLNSVTPEDTAVYYCARGDSSSWYAFDYWGQGTLVTVSSTREQKLISEEDLAKPTTTPAPRPPTPAPTIASQPLSLRPEACRPAAGGAVHTRGLDFACDIYIWAPLAGTCGVLLLSLVITLYCGRARVKFSRSADAPAYQQGQNQLYNELNLGRREEYDVLDKRRGRDPEMGGKPRRKNPQEGLYNELQKDKMAEAYSEIGMKGERRRGKGHDGLYQGLSTATKDTYDALHMQALPPRSRGSGATNFSLLKQAGDVEENPGPGIHMATYEVLCEVARKLGTDDREVVLFLLNVFIPQPTLAQLIGALRALKEEGRLTFPLLAECLFRAGRRDLLRDLLHLDPRFLERHLAGTMSYFSPYQLTVLHVDGELCARDIRSLIFLSKDTIGSRSTPQTFLHWVYCMENLDLLGPTDVDALMSMLRSLSRVDLQRQVQTLMGLHLSGPSHSQHYRHTPLETDFYDYKDDDDKTSGSGEGRGSLLTCGDVEENPGPHMTEYKPTVRLATRDDVPRAVRTLAAAFADYPATRHTVDPDRHIERVTELQELFLTRVGLDIGKVWVADDGAAVAVWTTPESVEAGAVFAEIGPRMAELSGSRLAAQQQMEGLLAPHRPKEPAWFLATVGVSPDHQGKGLGSAVVLPGVEAAERAGVPAFLETSAPRNLPFYERLGFTVTADVEVPEGPRTWCMTRKPGA

SEQ ID NO: 2921 - protein, 918 aa, Artificial Sequence
  Synthetic Polypeptide
MALPVTALLLPLALLLHAARPDQTVVTQPPSASGTPGQRVTISCSGSSSNIGSNYVYWYQQLPGTAPKLLIYRSNQRPSGVPDRFSGSKSGTSASLAISGPRSVDEADYYCAAWDDSLNGVVFGGGTKLTVLGGGGGSGGGGSGGGGSQVQLVQSGAEVKKPGSSVKVSCKASGGTFSSYAISWVRQAPGQGLEWMGGIIPIFGTANYAQKFQGRVTITADESTSTAYMELSSLRSEDTAVYYCARRIPPYYGMDVWGQGTTVTVSSTREQKLISEEDLAKPTTTPAPRPPTPAPTIASQPLSLRPEACRPAAGGAVHTRGLDFACDIYIWAPLAGTCGVLLLSLVITLYCGRARVKFSRSADAPAYQQGQNQLYNELNLGRREEYDVLDKRRGRDPEMGGKPRRKNPQEGLYNELQKDKMAEAYSEIGMKGERRRGKGHDGLYQGLSTATKDTYDALHMQALPPRSRGSGATNFSLLKQAGDVEENPGPGIHMATYEVLCEVARKLGTDDREVVLFLLNVFIPQPTLAQLIGALRALKEEGRLTFPLLAECLFRAGRRDLLRDLLHLDPRFLERHLAGTMSYFSPYQLTVLHVDGELCARDIRSLIFLSKDTIGSRSTPQTFLHWVYCMENLDLLGPTDVDALMSMLRSLSRVDLQRQVQTLMGLHLSGPSHSQHYRHTPLETDFYDYKDDDDKTSGSGEGRGSLLTCGDVEENPGPHMTEYKPTVRLATRDDVPRAVRTLAAAFADYPATRHTVDPDRHIERVTELQELFLTRVGLDIGKVWVADDGAAVAVWTTPESVEAGAVFAEIGPRMAELSGSRLAAQQQMEGLLAPHRPKEPAWFLATVGVSPDHQGKGLGSAVVLPGVEAAERAGVPAFLETSAPRNLPFYERLGFTVTADVEVPEGPRTWCMTRKPGA

SEQ ID NO: 2922 - protein, 918 aa, Artificial Sequence
  Synthetic Polypeptide
MALPVTALLLPLALLLHAARPDQSVVTQPPSVSVAPGKTARITCGRNNIGSKSVHWYQQKPGQAPVLVVYDDSDRPSGIPERFSGSNSGNTATLTISRVEAGDEADYYCQVWDSSSDHVVFGGGTKLTVLGGGGGSGGGGSGGGGSEVQLVQSGGGVVRPGGSLRLSCAASGFTFDDYGMSWVRQAPGKGLEWVSGINWNGGSTGYADSVRGRFTISRDNAKNSLYLQMNSLRAEDTALYYCARERGYGYHDPHDYWGQGTLVTVSSTREQKLISEEDLAKPTTTPAPRPPTPAPTIASQPLSLRPEACRPAAGGAVHTRGLDFACDIYIWAPLAGTCGVLLLSLVITLYCGRARVKFSRSADAPAYQQGQNQLYNELNLGRREEYDVLDKRRGRDPEMGGKPRRKNPQEGLYNELQKDKMAEAYSEIGMKGERRRGKGHDGLYQGLSTATKDTYDALHMQALPPRSRGSGATNFSLLKQAGDVEENPGPGIHMATYEVLCEVARKLGTDDREVVLFLLNVFIPQPTLAQLIGALRALKEEGRLTFPLLAECLFRAGRRDLLRDLLHLDPRFLERHLAGTMSYFSPYQLTVLHVDGELCARDIRSLIFLSKDTIGSRSTPQTFLHWVYCMENLDLLGPTDVDALMSMLRSLSRVDLQRQVQTLMGLHLSGPSHSQHYRHTPLETDFYDYKDDDDKTSGSGEGRGSLLTCGDVEENPGPHMTEYKPTVRLATRDDVPRAVRTLAAAFADYPATRHTVDPDRHIERVTELQELFLTRVGLDIGKVWVADDGAAVAVWTTPESVEAGAVFAEIGPRMAELSGSRLAAQQQMEGLLAPHRPKEPAWFLATVGVSPDHQGKGLGSAVVLPGVEAAERAGVPAFLETSAPRNLPFYERLGFTVTADVEVPEGPRTWCMTRKPGA

SEQ ID NO: 2923 - protein, 930 aa, Artificial Sequence
  Synthetic Polypeptide
MALPVTALLLPLALLLHAARPEQKLISEEDLEFQAVVTQPPSASGTPGQRVTISCSGSSSNIGSNTVNWYQQVPGTAPKLLIYSNNQRPSGVPDRFSGSKSGTSASLAISGLQSEDEADYYCAAWDDSLNGWVFGGGTKLTVLGGGGSGGGGSGGGGSQMQLVQSGAEVKEPGESLRISCKGSGYSFTNFWISWVRQMPGKGLEWMGRVDPGYSYSTYSPSFQGHVTISADKSTSTAYLQWNSLKASDTAMYYCARVQYSGYYDWFDPWGQGTLVTVSSTREQKLISEEDLAKPTTTPAPRPPTPAPTIASQPLSLRPEACRPAAGGAVHTRGLDFACDIYIWAPLAGTCGVLLLSLVITLYCGRARVKFSRSADAPAYQQGQNQLYNELNLGRREEYDVLDKRRGRDPEMGGKPRRKNPQEGLYNELQKDKMAEAYSEIGMKGERRRGKGHDGLYQGLSTATKDTYDALHMQALPPRSRGSGATNFSLLKQAGDVEENPGPGIHMATYEVLCEVARKLGTDDREVVLFLLNVFIPQPTLAQLIGALRALKEEGRLTFPLLAECLFRAGRRDLLRDLLHLDPRFLERHLAGTMSYFSPYQLTVLHVDGELCARDIRSLIFLSKDTIGSRSTPQTFLHWVYCMENLDLLGPTDVDALMSMLRSLSRVDLQRQVQTLMGLHLSGPSHSQHYRHTPLETDFYDYKDDDDKTSGSGEGRGSLLTCGDVEENPGPHMTEYKPTVRLATRDDVPRAVRTLAAAFADYPATRHTVDPDRHIERVTELQELFLTRVGLDIGKVWVADDGAAVAVWTTPESVEAGAVFAEIGPRMAELSGSRLAAQQQMEGLLAPHRPKEPAWFLATVGVSPDHQGKGLGSAVVLPGVEAAERAGVPAFLETSAPRNLPFYERLGFTVTADVEVPEGPRTWCMTRKPGA

SEQ ID NO: 2924 - protein, 924 aa, Artificial Sequence
  Synthetic Polypeptide
MALPVTALLLPLALLLHAARPEQKLISEEDLEFDIQMTQSPSTLSASVGDRVTITCRASQNINKWLAWYQQRPGKAPQLLIYKASSLESGVPSRFSGSGSGTEYTLTISSLQPDDFATYYCQQYNSYATFGQGTKVEIKRGGGGSGGGGSGGGGSQVQLVQSGAEVKKPGESLKISCKGSGYNFSNKWIGWVRQLPGRGLEWIAIIYPGYSDITYSPSFQGRVTISADTSINTAYLHWHSLKASDTAMYYCVRHTALAGFDYWGLGTLVTVSSTREQKLISEEDLAKPTTTPAPRPPTPAPTIASQPLSLRPEACRPAAGGAVHTRGLDFACDIYIWAPLAGTCGVLLLSLVITLYCGRARVKFSRSADAPAYQQGQNQLYNELNLGRREEYDVLDKRRGRDPEMGGKPRRKNPQEGLYNELQKDKMAEAYSEIGMKGERRRGKGHDGLYQGLSTATKDTYDALHMQALPPRSRGSGATNFSLLKQAGDVEENPGPGIHMATYEVLCEVARKLGTDDREVVLFLLNVFIPQPTLAQLIGALRALKEEGRLTFPLLAECLFRAGRRDLLRDLLHLDPRFLERHLAGTMSYFSPYQLTVLHVDGELCARDIRSLIFLSKDTIGSRSTPQTFLHWVYCMENLDLLGPTDVDALMSMLRSLSRVDLQRQVQTLMGLHLSGPSHSQHYRHTPLETDFYDYKDDDDKTSGSGEGRGSLLTCGDVEENPGPHMTEYKPTVRLATRDDVPRAVRTLAAAFADYPATRHTVDPDRHIERVTELQELFLTRVGLDIGKVWVADDGAAVAVWTTPESVEAGAVFAEIGPRMAELSGSRLAAQQQMEGLLAPHRPKEPAWFLATVGVSPDHQGKGLGSAVVLPGVEAAERAGVPAFLETSAPRNLPFYERLGFTVTADVEVPEGPRTWCMTRKPGA

SEQ ID NO: 2925 - protein, 914 aa, Artificial Sequence
  Synthetic Polypeptide
MALPVTALLLPLALLLHAARPEIVLTQSPGTLSLSPGERATLSCRASQSVSNTYLAWYHQRPGQAPRLLIYGASSRATGIPDRFSGSGSGTDFALTISSLEPEDFAVYYCQQYSNSWTFGQGTKVEIKRGGGGSGGGGSGGGGSQVQLVESGGGVVQPGRSLRLSCAASGFTFSSYDMHWVRQAPGKGLEWVAVISYDGTNEYYADSVKGRFTISRDTSKNTLYLQMNSLRAEDTAVYYCARERYFDWSFDYWGQGTLVSVSSTREQKLISEEDLAKPTTTPAPRPPTPAPTIASQPLSLRPEACRPAAGGAVHTRGLDFACDIYIWAPLAGTCGVLLLSLVITLYCGRARVKFSRSADAPAYQQGQNQLYNELNLGRREEYDVLDKRRGRDPEMGGKPRRKNPQEGLYNELQKDKMAEAYSEIGMKGERRRGKGHDGLYQGLSTATKDTYDALHMQALPPRSRGSGATNFSLLKQAGDVEENPGPGIHMATYEVLCEVARKLGTDDREVVLFLLNVFIPQPTLAQLIGALRALKEEGRLTFPLLAECLFRAGRRDLLRDLLHLDPRFLERHLAGTMSYFSPYQLTVLHVDGELCARDIRSLIFLSKDTIGSRSTPQTFLHWVYCMENLDLLGPTDVDALMSMLRSLSRVDLQRQVQTLMGLHLSGPSHSQHYRHTPLETDFYDYKDDDDKTSGSGEGRGSLLTCGDVEENPGPHMTEYKPTVRLATRDDVPRAVRTLAAAFADYPATRHTVDPDRHIERVTELQELFLTRVGLDIGKVWVADDGAAVAVWTTPESVEAGAVFAEIGPRMAELSGSRLAAQQQMEGLLAPHRPKEPAWFLATVGVSPDHQGKGLGSAVVLPGVEAAERAGVPAFLETSAPRNLPFYERLGFTVTADVEVPEGPRTWCMTRKPGA

SEQ ID NO: 2926 - protein, 913 aa, Artificial Sequence
  Synthetic Polypeptide
MALPVTALLLPLALLLHAARPELTQDPAVSVALGQTVRITCQGDSLRSNYANWYQQKPGQAPVLVIYGQNNRPSGIPDRFSGSSSGNTASLTITGAQAADEADYYCDSRVSTGNHVVFGGGTKLTVLGQGGGGSGGGGSGGGGSEVQLVQSGAEVKKPGASVKVSCKASGYTFTSYAMHWVRQAPGQRLEWMGWINAGNGNTKYSQKFQGRVTITRDTSASTAYMELSSLRSEDTAVYYCARDISYGSFDYWGQGTLVTVSSTREQKLISEEDLAKPTTTPAPRPPTPAPTIASQPLSLRPEACRPAAGGAVHTRGLDFACDIYIWAPLAGTCGVLLLSLVITLYCGRARVKFSRSADAPAYQQGQNQLYNELNLGRREEYDVLDKRRGRDPEMGGKPRRKNPQEGLYNELQKDKMAEAYSEIGMKGERRRGKGHDGLYQGLSTATKDTYDALHMQALPPRSRGSGATNFSLLKQAGDVEENPGPGIHMATYEVLCEVARKLGTDDREVVLFLLNVFIPQPTLAQLIGALRALKEEGRLTFPLLAECLFRAGRRDLLRDLLHLDPRFLERHLAGTMSYFSPYQLTVLHVDGELCARDIRSLIFLSKDTIGSRSTPQTFLHWVYCMENLDLLGPTDVDALMSMLRSLSRVDLQRQVQTLMGLHLSGPSHSQHYRHTPLETDFYDYKDDDDKTSGSGEGRGSLLTCGDVEENPGPHMTEYKPTVRLATRDDVPRAVRTLAAAFADYPATRHTVDPDRHIERVTELQELFLTRVGLDIGKVWVADDGAAVAVWTTPESVEAGAVFAEIGPRMAELSGSRLAAQQQMEGLLAPHRPKEPAWFLATVGVSPDHQGKGLGSAVVLPGVEAAERAGVPAFLETSAPRNLPFYERLGFTVTADVEVPEGPRTWCMTRKPGA

SEQ ID NO: 2927 - protein, 915 aa, Artificial Sequence
  Synthetic Polypeptide
MALPVTALLLPLALLLHAARPDIVLTQTPATLSVTPGDSVSLSCRASQSISNNLHWYQQKSHESPRLLIKNASQSISGIPSKFSGSGSGTDFTLRINSVETEDFGMYFCQQSNSWPYTFGSGTKLEIKGGGGSGGGGSGGGGSQVKLQQSGPELVKPGASVKISCKASGYSFTGYYMHWVKQSHGNILDWIGYIYPYNGVSSYNQKFKGKATLTVDKSSSTAYMELRSLTSEDSAVYYCARERGLYQLRAMDYWGQGTSVTVSSTREQKLISEEDLAKPTTTPAPRPPTPAPTIASQPLSLRPEACRPAAGGAVHTRGLDFACDIYIWAPLAGTCGVLLLSLVITLYCGRARVKFSRSADAPAYQQGQNQLYNELNLGRREEYDVLDKRRGRDPEMGGKPRRKNPQEGLYNELQKDKMAEAYSEIGMKGERRRGKGHDGLYQGLSTATKDTYDALHMQALPPRSRGSGATNFSLLKQAGDVEENPGPGIHMATYEVLCEVARKLGTDDREVVLFLLNVFIPQPTLAQLIGALRALKEEGRLTFPLLAECLFRAGRRDLLRDLLHLDPRFLERHLAGTMSYFSPYQLTVLHVDGELCARDIRSLIFLSKDTIGSRSTPQTFLHWVYCMENLDLLGPTDVDALMSMLRSLSRVDLQRQVQTLMGLHLSGPSHSQHYRHTPLETDFYDYKDDDDKTSGSGEGRGSLLTCGDVEENPGPHMTEYKPTVRLATRDDVPRAVRTLAAAFADYPATRHTVDPDRHIERVTELQELFLTRVGLDIGKVWVADDGAAVAVWTTPESVEAGAVFAEIGPRMAELSGSRLAAQQQMEGLLAPHRPKEPAWFLATVGVSPDHQGKGLGSAVVLPGVEAAERAGVPAFLETSAPRNLPFYERLGFTVTADVEVPEGPRTWCMTRKPGA

SEQ ID NO: 2928 - protein, 906 aa, Artificial Sequence
  Synthetic Polypeptide
MALPVTALLLPLALLLHAARPDIVMTQTPAIMSASPGQKVTITCSASSSVNYMHWYQQKLGSSPKLWIYDTSKLAPGVPARFSGSGSGTSYSLTISSMEAEDAASYFCHQWSSYPYTFGSGTKLEIKGGGGSGGGGSGGGGSEVQLQESGPDLVKPSQSLSLTCTVTGYSITSGYGWHWIRQFPGNKLEWMGYIHYSGSTTYNPSLKSRISISRDTSKNQFFLQLNSVTTEDTATYYCARSLRYWGQGTTLTVSSTREQKLISEEDLAKPTTTPAPRPPTPAPTIASQPLSLRPEACRPAAGGAVHTRGLDFACDIYIWAPLAGTCGVLLLSLVITLYCGRARVKFSRSADAPAYQQGQNQLYNELNLGRREEYDVLDKRRGRDPEMGGKPRRKNPQEGLYNELQKDKMAEAYSEIGMKGERRRGKGHDGLYQGLSTATKDTYDALHMQALPPRSRGSGATNFSLLKQAGDVEENPGPGIHMATYEVLCEVARKLGTDDREVVLFLLNVFIPQPTLAQLIGALRALKEEGRLTFPLLAECLFRAGRRDLLRDLLHLDPRFLERHLAGTMSYFSPYQLTVLHVDGELCARDIRSLIFLSKDTIGSRSTPQTFLHWVYCMENLDLLGPTDVDALMSMLRSLSRVDLQRQVQTLMGLHLSGPSHSQHYRHTPLETDFYDYKDDDDKTSGSGEGRGSLLTCGDVEENPGPHMTEYKPTVRLATRDDVPRAVRTLAAAFADYPATRHTVDPDRHIERVTELQELFLTRVGLDIGKVWVADDGAAVAVWTTPESVEAGAVFAEIGPRMAELSGSRLAAQQQMEGLLAPHRPKEPAWFLATVGVSPDHQGKGLGSAVVLPGVEAAERAGVPAFLETSAPRNLPFYERLGFTVTADVEVPEGPRTWCMTRKPGA

SEQ ID NO: 2929 - protein, 909 aa, Artificial Sequence
  Synthetic Polypeptide
MALPVTALLLPLALLLHAARPDIQMTQSPSSLSASVGDRVTITCSATSSISYMHWYQQKPGKAPKGWIYDTSKLAHGVPSRFSGSGSGTDFTLTISSLQPEDFATYYCHQRRSYPFTFGQGTKVEIKGGGGSGGGGSGGGGSEVQLVQSGAEVKKPGASVKVSCKASGYTFTNFWIHWVRQAPGQGLEWIGEIDPSDSYTNYNQKFKGRVTITRDTSTSTAYLELSSLRSEDTAVYYCAREITTVDYWGQGTLVTVSSTREQKLISEEDLAKPTTTPAPRPPTPAPTIASQPLSLRPEACRPAAGGAVHTRGLDFACDIYIWAPLAGTCGVLLLSLVITLYCGRARVKFSRSADAPAYQQGQNQLYNELNLGRREEYDVLDKRRGRDPEMGGKPRRKNPQEGLYNELQKDKMAEAYSEIGMKGERRRGKGHDGLYQGLSTATKDTYDALHMQALPPRSRGSGATNFSLLKQAGDVEENPGPGIHMATYEVLCEVARKLGTDDREVVLFLLNVFIPQPTLAQLIGALRALKEEGRLTFPLLAECLFRAGRRDLLRDLLHLDPRFLERHLAGTMSYFSPYQLTVLHVDGELCARDIRSLIFLSKDTIGSRSTPQTFLHWVYCMENLDLLGPTDVDALMSMLRSLSRVDLQRQVQTLMGLHLSGPSHSQHYRHTPLETDFYDYKDDDDKTSGSGEGRGSLLTCGDVEENPGPHMTEYKPTVRLATRDDVPRAVRTLAAAFADYPATRHTVDPDRHIERVTELQELFLTRVGLDIGKVWVADDGAAVAVWTTPESVEAGAVFAEIGPRMAELSGSRLAAQQQMEGLLAPHRPKEPAWFLATVGVSPDHQGKGLGSAVVLPGVEAAERAGVPAFLETSAPRNLPFYERLGFTVTADVEVPEGPRTWCMTRKPGA

SEQ ID NO: 2930 - protein, 916 aa, Artificial Sequence
  Synthetic Polypeptide
MALPVTALLLPLALLLHAARPDIQMTQSPSSLSASVGDRVTITCKASQGFNKYVAWYQQKPGKAPKLLIYYTSTLQPGVPSRFSGSGSGRDYTLTISSLQPEDFATYYCLQYGNLLYAFGQGTKVEIKRGGGGSGGGGSGGGGSEVQLVQSGAEVKKPGASVKVSCKASGYTFTSYWIGWVRQAPGQGLEWIGDIYPGGGYTNYNEKFKGRVTITRDTSTSTAYLELSSLRSEDTAVYYCARLDGSSYRGAMDSWGQGTLVTVSSTREQKLISEEDLAKPTTTPAPRPPTPAPTIASQPLSLRPEACRPAAGGAVHTRGLDFACDIYIWAPLAGTCGVLLLSLVITLYCGRARVKFSRSADAPAYQQGQNQLYNELNLGRREEYDVLDKRRGRDPEMGGKPRRKNPQEGLYNELQKDKMAEAYSEIGMKGERRRGKGHDGLYQGLSTATKDTYDALHMQALPPRSRGSGATNFSLLKQAGDVEENPGPGIHMATYEVLCEVARKLGTDDREVVLFLLNVFIPQPTLAQLIGALRALKEEGRLTFPLLAECLFRAGRRDLLRDLLHLDPRFLERHLAGTMSYFSPYQLTVLHVDGELCARDIRSLIFLSKDTIGSRSTPQTFLHWVYCMENLDLLGPTDVDALMSMLRSLSRVDLQRQVQTLMGLHLSGPSHSQHYRHTPLETDFYDYKDDDDKTSGSGEGRGSLLTCGDVEENPGPHMTEYKPTVRLATRDDVPRAVRTLAAAFADYPATRHTVDPDRHIERVTELQELFLTRVGLDIGKVWVADDGAAVAVWTTPESVEAGAVFAEIGPRMAELSGSRLAAQQQMEGLLAPHRPKEPAWFLATVGVSPDHQGKGLGSAVVLPGVEAAERAGVPAFLETSAPRNLPFYERLGFTVTADVEVPEGPRTWCMTRKPGA

SEQ ID NO: 2931 - protein, 920 aa, Artificial Sequence
  Synthetic Polypeptide
MALPVTALLLPLALLLHAARPDIQLTQSPSSLSASVGDRVTITCRASQSVDYDGDSYMNWYQQKPGKAPKLLIYAASYLESGVPSRFSGSGSGTDFTLTISSLQPEDFATYYCQQSHEDPYTFGQGTKVEIKRGGGGSGGGGSGGGGSEVQLVESGGGLVQPGGSLRLSCAVSGYSITSGYSWNWIRQAPGKGLEWVASITYDGSTNYNPSVKGRITISRDDSKNTFYLQMNSLRAEDTAVYYCARGSHYFGHWHFAVWGQGTLVTVSSTREQKLISEEDLAKPTTTPAPRPPTPAPTIASQPLSLRPEACRPAAGGAVHTRGLDFACDIYIWAPLAGTCGVLLLSLVITLYCGRARVKFSRSADAPAYQQGQNQLYNELNLGRREEYDVLDKRRGRDPEMGGKPRRKNPQEGLYNELQKDKMAEAYSEIGMKGERRRGKGHDGLYQGLSTATKDTYDALHMQALPPRSRGSGATNFSLLKQAGDVEENPGPGIHMATYEVLCEVARKLGTDDREVVLFLLNVFIPQPTLAQLIGALRALKEEGRLTFPLLAECLFRAGRRDLLRDLLHLDPRFLERHLAGTMSYFSPYQLTVLHVDGELCARDIRSLIFLSKDTIGSRSTPQTFLHWVYCMENLDLLGPTDVDALMSMLRSLSRVDLQRQVQTLMGLHLSGPSHSQHYRHTPLETDFYDYKDDDDKTSGSGEGRGSLLTCGDVEENPGPHMTEYKPTVRLATRDDVPRAVRTLAAAFADYPATRHTVDPDRHIERVTELQELFLTRVGLDIGKVWVADDGAAVAVWTTPESVEAGAVFAEIGPRMAELSGSRLAAQQQMEGLLAPHRPKEPAWFLATVGVSPDHQGKGLGSAVVLPGVEAAERAGVPAFLETSAPRNLPFYERLGFTVTADVEVPEGPRTWCMTRKPGA

SEQ ID NO: 2932 - protein, 912 aa, Artificial Sequence
  Synthetic Polypeptide
MALPVTALLLPLALLLHAARPDIQMTQSPSSLSASVGDRVTITCRASQDIRYYLNWYQQKPGKAPKLLIYVASSLQSGVPSRFSGSGSGTEFTLTVSSLQPEDFATYYCLQVYSTPRTFGQGTKVEIKGGGGSGGGGSGGGGSEVQLVESGGGLAKPGGSLRLSCAASGFRFTFNNYYMDWVRQAPGQGLEWVSRISSSGDPTWYADSVKGRFTISRENAKNTLFLQMNSLRAEDTAVYYCASLTTGSDSWGQGVLVTVSSTREQKLISEEDLAKPTTTPAPRPPTPAPTIASQPLSLRPEACRPAAGGAVHTRGLDFACDIYIWAPLAGTCGVLLLSLVITLYCGRARVKFSRSADAPAYQQGQNQLYNELNLGRREEYDVLDKRRGRDPEMGGKPRRKNPQEGLYNELQKDKMAEAYSEIGMKGERRRGKGHDGLYQGLSTATKDTYDALHMQALPPRSRGSGATNFSLLKQAGDVEENPGPGIHMATYEVLCEVARKLGTDDREVVLFLLNVFIPQPTLAQLIGALRALKEEGRLTFPLLAECLFRAGRRDLLRDLLHLDPRFLERHLAGTMSYFSPYQLTVLHVDGELCARDIRSLIFLSKDTIGSRSTPQTFLHWVYCMENLDLLGPTDVDALMSMLRSLSRVDLQRQVQTLMGLHLSGPSHSQHYRHTPLETDFYDYKDDDDKTSGSGEGRGSLLTCGDVEENPGPHMTEYKPTVRLATRDDVPRAVRTLAAAFADYPATRHTVDPDRHIERVTELQELFLTRVGLDIGKVWVADDGAAVAVWTTPESVEAGAVFAEIGPRMAELSGSRLAAQQQMEGLLAPHRPKEPAWFLATVGVSPDHQGKGLGSAVVLPGVEAAERAGVPAFLETSAPRNLPFYERLGFTVTADVEVPEGPRTWCMTRKPGA

SEQ ID NO: 2933 - protein, 913 aa, Artificial Sequence
  Synthetic Polypeptide
MALPVTALLLPLALLLHAARPEIVMTQSPATLSVSPGERATLSCRASQSVSRNLAWYQQKPGQAPRLLIYGASTRATGIPARFSGSGSGTEFTLTIGSLQSEDFAVYYCQQYKTWPRTFGQGTNVEIKGGGGSGGGGSGGGGSQVQLQQWGAGLLKPSETLSLTCAVFGGSFSGYYWSWIRQPPGKGLEWIGEINHRGNTNDNPSLKSRVTISVDTSKNQFALKLSSVTAADTAVYYCARERGYTYGNFDHWGQGTLVTVSSTREQKLISEEDLAKPTTTPAPRPPTPAPTIASQPLSLRPEACRPAAGGAVHTRGLDFACDIYIWAPLAGTCGVLLLSLVITLYCGRARVKFSRSADAPAYQQGQNQLYNELNLGRREEYDVLDKRRGRDPEMGGKPRRKNPQEGLYNELQKDKMAEAYSEIGMKGERRRGKGHDGLYQGLSTATKDTYDALHMQALPPRSRGSGATNFSLLKQAGDVEENPGPGIHMATYEVLCEVARKLGTDDREVVLFLLNVFIPQPTLAQLIGALRALKEEGRLTFPLLAECLFRAGRRDLLRDLLHLDPRFLERHLAGTMSYFSPYQLTVLHVDGELCARDIRSLIFLSKDTIGSRSTPQTFLHWVYCMENLDLLGPTDVDALMSMLRSLSRVDLQRQVQTLMGLHLSGPSHSQHYRHTPLETDFYDYKDDDDKTSGSGEGRGSLLTCGDVEENPGPHMTEYKPTVRLATRDDVPRAVRTLAAAFADYPATRHTVDPDRHIERVTELQELFLTRVGLDIGKVWVADDGAAVAVWTTPESVEAGAVFAEIGPRMAELSGSRLAAQQQMEGLLAPHRPKEPAWFLATVGVSPDHQGKGLGSAVVLPGVEAAERAGVPAFLETSAPRNLPFYERLGFTVTADVEVPEGPRTWCMTRKPGA

SEQ ID NO: 2934 - protein, 914 aa, Artificial Sequence
  Synthetic Polypeptide
MALPVTALLLPLALLLHAARPEIVMTPSSATLSVSPGERATLSCRASQSVSRNLAWYQQKPGQAPRLLIYGASTRATGIPARFSGSGSGTEFTLTISSLQSEDFAVYYCHQYSNWMCSFGQGTKLEIKGGGGSGGGGSGGGGSEVQLLESGGGLVQPGGSLRLSCAASGFTFSRYAMNWVRQAPGKGLEWVSGISGSGGRTYYADSVKGRFTISRDNSKNTLYLQMNSLRAEDTAVYYCAKDRDFWSGPFDYWGQGTLVTVSSTREQKLISEEDLAKPTTTPAPRPPTPAPTIASQPLSLRPEACRPAAGGAVHTRGLDFACDIYIWAPLAGTCGVLLLSLVITLYCGRARVKFSRSADAPAYQQGQNQLYNELNLGRREEYDVLDKRRGRDPEMGGKPRRKNPQEGLYNELQKDKMAEAYSEIGMKGERRRGKGHDGLYQGLSTATKDTYDALHMQALPPRSRGSGATNFSLLKQAGDVEENPGPGIHMATYEVLCEVARKLGTDDREVVLFLLNVFIPQPTLAQLIGALRALKEEGRLTFPLLAECLFRAGRRDLLRDLLHLDPRFLERHLAGTMSYFSPYQLTVLHVDGELCARDIRSLIFLSKDTIGSRSTPQTFLHWVYCMENLDLLGPTDVDALMSMLRSLSRVDLQRQVQTLMGLHLSGPSHSQHYRHTPLETDFYDYKDDDDKTSGSGEGRGSLLTCGDVEENPGPHMTEYKPTVRLATRDDVPRAVRTLAAAFADYPATRHTVDPDRHIERVTELQELFLTRVGLDIGKVWVADDGAAVAVWTTPESVEAGAVFAEIGPRMAELSGSRLAAQQQMEGLLAPHRPKEPAWFLATVGVSPDHQGKGLGSAVVLPGVEAAERAGVPAFLETSAPRNLPFYERLGFTVTADVEVPEGPRTWCMTRKPGA

SEQ ID NO: 2935 - protein, 914 aa, Artificial Sequence; identical to SEQ ID NO: 2934
  Synthetic Polypeptide

SEQ ID NO: 2936 - protein, 916 aa, Artificial Sequence
  Synthetic Polypeptide
MALPVTALLLPLALLLHAARPQVQLQQSDAELVKPGSSVKISCKASGYTFTDHAIHWVKQKPEQGLEWIGHFSPGNTDIKYNDKFKGKATLTVDRSSSTAYMQLNSLTSEDSAVYFCKTSTFFFDYWGQGTTLTVSSGGGGSGGGGSGGGGSELVMTQSPSSLTVTAGEKVTMICKSSQSLLNSGDQKNYLTWYQQKPGQPPKLLIFWASTRESGVPDRFTGSGSGTDFTLTISSVQAEDLAVYYCQNDYSYPLTFGAGTKLELKTREQKLISEEDLAKPTTTPAPRPPTPAPTIASQPLSLRPEACRPAAGGAVHTRGLDFACDIYIWAPLAGTCGVLLLSLVITLYCGRARVKFSRSADAPAYQQGQNQLYNELNLGRREEYDVLDKRRGRDPEMGGKPRRKNPQEGLYNELQKDKMAEAYSEIGMKGERRRGKGHDGLYQGLSTATKDTYDALHMQALPPRSRGSGATNFSLLKQAGDVEENPGPGIHMATYEVLCEVARKLGTDDREVVLFLLNVFIPQPTLAQLIGALRALKEEGRLTFPLLAECLFRAGRRDLLRDLLHLDPRFLERHLAGTMSYFSPYQLTVLHVDGELCARDIRSLIFLSKDTIGSRSTPQTFLHWVYCMENLDLLGPTDVDALMSMLRSLSRVDLQRQVQTLMGLHLSGPSHSQHYRHTPLETDFYDYKDDDDKTSGSGEGRGSLLTCGDVEENPGPHMTEYKPTVRLATRDDVPRAVRTLAAAFADYPATRHTVDPDRHIERVTELQELFLTRVGLDIGKVWVADDGAAVAVWTTPESVEAGAVFAEIGPRMAELSGSRLAAQQQMEGLLAPHRPKEPAWFLATVGVSPDHQGKGLGSAVVLPGVEAAERAGVPAFLETSAPRNLPFYERLGFTVTADVEVPEGPRTWCMTRKPGA

SEQ ID NO: 2937 - protein, 917 aa, Artificial Sequence
  Synthetic Polypeptide
MALPVTALLLPLALLLHAARPEVQLVESGGGLVQPGRSLRLSCAASGFTFDDYAMHWVRQAPGKGLEWVSGISWNSGSIGYADSVKGRFTISRDNAKNSLYLQMNSLRAEDTALYYCAKDKGGGYYDFWSGSDYWGQGTLVTVSSGGGGSGGGGSGGGGSSSELTQDPAVSVALGQTVRITCQGDSLRSYYASWYQQKPGQAPVLVIYGKNNRPSGIPDRFSGSSSGNTASLTITGAQAEDEADYYCNSRDSSGWVFGGGTKLTVLTREQKLISEEDLAKPTTTPAPRPPTPAPTIASQPLSLRPEACRPAAGGAVHTRGLDFACDIYIWAPLAGTCGVLLLSLVITLYCGRARVKFSRSADAPAYQQGQNQLYNELNLGRREEYDVLDKRRGRDPEMGGKPRRKNPQEGLYNELQKDKMAEAYSEIGMKGERRRGKGHDGLYQGLSTATKDTYDALHMQALPPRSRGSGATNFSLLKQAGDVEENPGPGIHMATYEVLCEVARKLGTDDREVVLFLLNVFIPQPTLAQLIGALRALKEEGRLTFPLLAECLFRAGRRDLLRDLLHLDPRFLERHLAGTMSYFSPYQLTVLHVDGELCARDIRSLIFLSKDTIGSRSTPQTFLHWVYCMENLDLLGPTDVDALMSMLRSLSRVDLQRQVQTLMGLHLSGPSHSQHYRHTPLETDFYDYKDDDDKTSGSGEGRGSLLTCGDVEENPGPHMTEYKPTVRLATRDDVPRAVRTLAAAFADYPATRHTVDPDRHIERVTELQELFLTRVGLDIGKVWVADDGAAVAVWTTPESVEAGAVFAEIGPRMAELSGSRLAAQQQMEGLLAPHRPKEPAWFLATVGVSPDHQGKGLGSAVVLPGVEAAERAGVPAFLETSAPRNLPFYERLGFTVTADVEVPEGPRTWCMTRKPGA

SEQ ID NO: 2938 - protein, 965 aa, Artificial Sequence
  Synthetic Polypeptide
MALPVTALLLPLALLLHAARPEVQLQQSGPGLVKPSQTLSLTCAISGDSVLSNSDTWNWIRQSPSRGLEWLGRTYHRSTWYDDYASSVRGRVSINVDTSKNQYSLQLNAVTPEDTGVYYCARDRLQDGNSWSDAFDVWGQGTMVTVSSGGGGSGGGGSGGGGSQSALTQPASVSGSPGQSITISCTGTSSDVGGYNYVSWYQQHPGKAPKLMIYDVSNRPSGVSNRFSGSKSGNTASLTISGLQAEDEADYYCSSYTSSSTLVYVFGTGTKVTVLTREQKLISEEDLAKPTTTPAPRPPTPAPTIASQPLSLRPEACRPAAGGAVHTRGLDFACDIYIWAPLAGTCGVLLLSLVITLYCKRGRKKLLYIFKQPFMRPVQTTQEEDGCSCRFPEEEEGGCELRVKFSRSADAPAYQQGQNQLYNELNLGRREEYDVLDKRRGRDPEMGGKPRRKNPQEGLYNELQKDKMAEAYSEIGMKGERRRGKGHDGLYQGLSTATKDTYDALHMQALPPRSRGSGATNFSLLKQAGDVEENPGPGIHMATYEVLCEVARKLGTDDREVVLFLLNVFIPQPTLAQLIGALRALKEEGRLTFPLLAECLFRAGRRDLLRDLLHLDPRFLERHLAGTMSYFSPYQLTVLHVDGELCARDIRSLIFLSKDTIGSRSTPQTFLHWVYCMENLDLLGPTDVDALMSMLRSLSRVDLQRQVQTLMGLHLSGPSHSQHYRHTPLETDFYDYKDDDDKTSGSGEGRGSLLTCGDVEENPGPHMTEYKPTVRLATRDDVPRAVRTLAAAFADYPATRHTVDPDRHIERVTELQELFLTRVGLDIGKVWVADDGAAVAVWTTPESVEAGAVFAEIGPRMAELSGSRLAAQQQMEGLLAPHRPKEPAWFLATVGVSPDHQGKGLGSAVVLPGVEAAERAGVPAFLETSAPRNLPFYERLGFTVTADVEVPEGPRTWCMTRKPGA

SEQ ID NO: 2939 - protein, 924 aa, Artificial Sequence
  Synthetic Polypeptide
MALPVTALLLPLALLLHAARPQVQLVQSGAEVKKPGASVKVSCKASGYTFTSYDINWVRQATGQGLEWMGWMNPNSGNTGYAQKFQGRVTMTRNTSISTAYMELSSLRSEDTAVYYCARGDSNYWSYYGMDVWGQGTLVTVSSGGGGSGGGGSGGGGSGGGGSQSVLTQPRSVSGSPGQSVTISCTGTSSDVGGYNYVSWYQQHPGEAPKLIIYDADKRPSGISNRFSSGKSGNTASLTISGLQVEDEADYYCCSYAGGSTWVFGGGTKVTVLTREQKLISEEDLAKPTTTPAPRPPTPAPTIASQPLSLRPEACRPAAGGAVHTRGLDFACDIYIWAPLAGTCGVLLLSLVITLYCGRARVKFSRSADAPAYQQGQNQLYNELNLGRREEYDVLDKRRGRDPEMGGKPRRKNPQEGLYNELQKDKMAEAYSEIGMKGERRRGKGHDGLYQGLSTATKDTYDALHMQALPPRSRGSGATNFSLLKQAGDVEENPGPGIHMATYEVLCEVARKLGTDDREVVLFLLNVFIPQPTLAQLIGALRALKEEGRLTFPLLAECLFRAGRRDLLRDLLHLDPRFLERHLAGTMSYFSPYQLTVLHVDGELCARDIRSLIFLSKDTIGSRSTPQTFLHWVYCMENLDLLGPTDVDALMSMLRSLSRVDLQRQVQTLMGLHLSGPSHSQHYRHTPLETDFYDYKDDDDKTSGSGEGRGSLLTCGDVEENPGPHMTEYKPTVRLATRDDVPRAVRTLAAAFADYPATRHTVDPDRHIERVTELQELFLTRVGLDIGKVWVADDGAAVAVWTTPESVEAGAVFAEIGPRMAELSGSRLAAQQQMEGLLAPHRPKEPAWFLATVGVSPDHQGKGLGSAVVLPGVEAAERAGVPAFLETSAPRNLPFYERLGFTVTADVEVPEGPRTWCMTRKPGA

SEQ ID NO: 2940 - protein, 963 aa, Artificial Sequence
  Synthetic Polypeptide
MALPVTALLLPLALLLHAARPQVQLVQSGAEVKKPGASVKVSCKASGYTFTSYDINWVRQATGQGLEWMGWMNPNSGNTGYAQKFQGRVTMTRNTSISTAYMELSSLRSEDTAVYYCARGDSNYWSYYGMDVWGQGTLVTVSSGGGGSGGGGSGGGGSGGGGSQSVLTQPRSVSGSPGQSVTISCTGTSSDVGGYNYVSWYQQHPGEAPKLIIYDADKRPSGISNRFSSGKSGNTASLTISGLQVEDEADYYCCSYAGGSTWVFGGGTKVTVLTREQKLISEEDLAKPTTTPAPRPPTPAPTIASQPLSLRPEACRPAAGGAVHTRGLDFACDIYIWAPLAGTCGVLLLSLVITLYCKRGRKKLLYIFKQPFMRPVQTTQEEDGCSCRFPEEEEGGCELRVKFSRSADAPAYQQGQNQLYNELNLGRREEYDVLDKRRGRDPEMGGKPRRKNPQEGLYNELQKDKMAEAYSEIGMKGERRRGKGHDGLYQGLSTATKDTYDALHMQALPPRSRGSGATNFSLLKQAGDVEENPGPGIHMATYEVLCEVARKLGTDDREVVLFLLNVFIPQPTLAQLIGALRALKEEGRLTFPLLAECLFRAGRRDLLRDLLHLDPRFLERHLAGTMSYFSPYQLTVLHVDGELCARDIRSLIFLSKDTIGSRSTPQTFLHWVYCMENLDLLGPTDVDALMSMLRSLSRVDLQRQVQTLMGLHLSGPSHSQHYRHTPLETDFYDYKDDDDKTSGSGEGRGSLLTCGDVEENPGPHMTEYKPTVRLATRDDVPRAVRTLAAAFADYPATRHTVDPDRHIERVTELQELFLTRVGLDIGKVWVADDGAAVAVWTTPESVEAGAVFAEIGPRMAELSGSRLAAQQQMEGLLAPHRPKEPAWFLATVGVSPDHQGKGLGSAVVLPGVEAAERAGVPAFLETSAPRNLPFYERLGFTVTADVEVPEGPRTWCMTRKPGA

SEQ ID NO: 2941 - protein, 925 aa, Artificial Sequence
  Synthetic Polypeptide
MALPVTALLLPLALLLHAARPEVQLQQSGPGLVKPSQTLSLTCAISGDSMLSNSDTWNWIRQSPSRGLEWLGRTYHRSTWYDDYASSVRGRVSINVDTSKNQYSLQLNAVTPEDTGVYYCARVRLQDGNSWSDAFDVWGQGTMVTVSSGGGGSGGGGSGGGGSQSALTQPASASGSPGQSVTISCTGTSSDVGGYNYVSWYQQHPGKAPKLMIYDVSNRPSGVSNRFSGSKSGNTASLTISGLQAEDEADYYCSSYTSSSTLYVFGTGTQLTVLTREQKLISEEDLAKPTTTPAPRPPTPAPTIASQPLSLRPEACRPAAGGAVHTRGLDFACDIYIWAPLAGTCGVLLLSLVITLYCGRARVKFSRSADAPAYQQGQNQLYNELNLGRREEYDVLDKRRGRDPEMGGKPRRKNPQEGLYNELQKDKMAEAYSEIGMKGERRRGKGHDGLYQGLSTATKDTYDALHMQALPPRSRGSGATNFSLLKQAGDVEENPGPGIHMATYEVLCEVARKLGTDDREVVLFLLNVFIPQPTLAQLIGALRALKEEGRLTFPLLAECLFRAGRRDLLRDLLHLDPRFLERHLAGTMSYFSPYQLTVLHVDGELCARDIRSLIFLSKDTIGSRSTPQTFLHWVYCMENLDLLGPTDVDALMSMLRSLSRVDLQRQVQTLMGLHLSGPSHSQHYRHTPLETDFYDYKDDDDKTSGSGEGRGSLLTCGDVEENPGPHMTEYKPTVRLATRDDVPRAVRTLAAAFADYPATRHTVDPDRHIERVTELQELFLTRVGLDIGKVWVADDGAAVAVWTTPESVEAGAVFAEIGPRMAELSGSRLAAQQQMEGLLAPHRPKEPAWFLATVGVSPDHQGKGLGSAVVLPGVEAAERAGVPAFLETSAPRNLPFYERLGFTVTADVEVPEGPRTWCMTRKPGA

SEQ ID NO: 2942 - protein, 953 aa, Artificial Sequence
  Synthetic Polypeptide
MALPVTALLLPLALLLHAARPDIQMTQTTSSLSASLGDRVTISCRASQDISKYLNWYQQKPDGTVKLLIYHTSRLHSGVPSRFSGSGSGTDYSLTISNLEQEDIATYFCQQGNTLPYTFGGGTKLEITGGGGSGGGGSGGGGSEVKLQESGPGLVAPSQSLSVTCTVSGVSLPDYGVSWIRQPPRKGLEWLGVIWGSETTYYNSALKSRLTIIKDNSKSQVFLKMNSLQTDDTAIYYCAKHYYYGGSYAMDYWGQGTSVTVSSRVEQKLISEEDLAKPTTTPAPRPPTPAPTIASQPLSLRPEACRPAAGGAVHTRGLDFACDIYIWAPLAGTCGVLLLSLVITLYCKRGRKKLLYIFKQPFMRPVQTTQEEDGCSCRFPEEEEGGCELRVKFSRSADAPAYQQGQNQLYNELNLGRREEYDVLDKRRGRDPEMGGKPRRKNPQEGLYNELQKDKMAEAYSEIGMKGERRRGKGHDGLYQGLSTATKDTYDALHMQALPPRSRGSGATNFSLLKQAGDVEENPGPGIHMATYEVLCEVARKLGTDDREVVLFLLNVFIPQPTLAQLIGALRALKEEGRLTFPLLAECLFRAGRRDLLRDLLHLDPRFLERHLAGTMSYFSPYQLTVLHVDGELCARDIRSLIFLSKDTIGSRSTPQTFLHWVYCMENLDLLGPTDVDALMSMLRSLSRVDLQRQVQTLMGLHLSGPSHSQHYRHTPLETDFYDYKDDDDKTSGSGEGRGSLLTCGDVEENPGPHMTEYKPTVRLATRDDVPRAVRTLAAAFADYPATRHTVDPDRHIERVTELQELFLTRVGLDIGKVWVADDGAAVAVWTTPESVEAGAVFAEIGPRMAELSGSRLAAQQQMEGLLAPHRPKEPAWFLATVGVSPDHQGKGLGSAVVLPGVEAAERAGVPAFLETSAPRNLPFYERLGFTVTADVEVPEGPRTWCMTRKPGA

SEQ ID NO: 2943 - protein, 953 aa, Artificial Sequence
  Synthetic Polypeptide
MALPVTALLLPLALLLHAARPEIVMTQSPATLSLSPGERATLSCRASQDISKYLNWYQQKPGQAPRLLIYHTSRLHSGIPARFSGSGSGTDYTLTISSLQPEDFAVYFCQQGNTLPYTFGQGTKLEIKGGGGSGGGGSGGGGSQVQLQESGPGLVKPSETLSLTCTVSGVSLPDYGVSWIRQPPGKGLEWIGVIWGSETTYYNSSLKSRVTISKDNSKNQVSLKLSSVTAADTAVYYCAKHYYYGGSYAMDYWGQGTLVTVSSTREQKLISEEDLAKPTTTPAPRPPTPAPTIASQPLSLRPEACRPAAGGAVHTRGLDFACDIYIWAPLAGTCGVLLLSLVITLYCKRGRKKLLYIFKQPFMRPVQTTQEEDGCSCRFPEEEEGGCELRVKFSRSADAPAYQQGQNQLYNELNLGRREEYDVLDKRRGRDPEMGGKPRRKNPQEGLYNELQKDKMAEAYSEIGMKGERRRGKGHDGLYQGLSTATKDTYDALHMQALPPRSRGSGATNFSLLKQAGDVEENPGPGIHMATYEVLCEVARKLGTDDREVVLFLLNVFIPQPTLAQLIGALRALKEEGRLTFPLLAECLFRAGRRDLLRDLLHLDPRFLERHLAGTMSYFSPYQLTVLHVDGELCARDIRSLIFLSKDTIGSRSTPQTFLHWVYCMENLDLLGPTDVDALMSMLRSLSRVDLQRQVQTLMGLHLSGPSHSQHYRHTPLETDFYDYKDDDDKTSGSGEGRGSLLTCGDVEENPGPHMTEYKPTVRLATRDDVPRAVRTLAAAFADYPATRHTVDPDRHIERVTELQELFLTRVGLDIGKVWVADDGAAVAVWTTPESVEAGAVFAEIGPRMAELSGSRLAAQQQMEGLLAPHRPKEPAWFLATVGVSPDHQGKGLGSAVVLPGVEAAERAGVPAFLETSAPRNLPFYERLGFTVTADVEVPEGPRTWCMTRKPGA

SEQ ID NO: 2944 - protein, 953 aa, Artificial Sequence
  Synthetic Polypeptide
MALPVTALLLPLALLLHAARPEIVMTQSPATLSLSPGERATLSCRASQDISKYLNWYQQKPGQAPRLLIYHTSRLHSGIPARFSGSGSGTDYTLTISSLQPEDFAVYFCQQGNTLPYTFGQGTKLEIKGGGGSGGGGSGGGGSQVQLQESGPGLVKPSETLSLTCTVSGVSLPDYGVSWIRQPPGKGLEWIGVIWGSETTYYQSSLKSRVTISKDNSKNQVSLKLSSVTAADTAVYYCAKHYYYGGSYAMDYWGQGTLVTVSSTREQKLISEEDLAKPTTTPAPRPPTPAPTIASQPLSLRPEACRPAAGGAVHTRGLDFACDIYIWAPLAGTCGVLLLSLVITLYCKRGRKKLLYIFKQPFMRPVQTTQEEDGCSCRFPEEEEGGCELRVKFSRSADAPAYQQGQNQLYNELNLGRREEYDVLDKRRGRDPEMGGKPRRKNPQEGLYNELQKDKMAEAYSEIGMKGERRRGKGHDGLYQGLSTATKDTYDALHMQALPPRSRGSGATNFSLLKQAGDVEENPGPGIHMATYEVLCEVARKLGTDDREVVLFLLNVFIPQPTLAQLIGALRALKEEGRLTFPLLAECLFRAGRRDLLRDLLHLDPRFLERHLAGTMSYFSPYQLTVLHVDGELCARDIRSLIFLSKDTIGSRSTPQTFLHWVYCMENLDLLGPTDVDALMSMLRSLSRVDLQRQVQTLMGLHLSGPSHSQHYRHTPLETDFYDYKDDDDKTSGSGEGRGSLLTCGDVEENPGPHMTEYKPTVRLATRDDVPRAVRTLAAAFADYPATRHTVDPDRHIERVTELQELFLTRVGLDIGKVWVADDGAAVAVWTTPESVEAGAVFAEIGPRMAELSGSRLAAQQQMEGLLAPHRPKEPAWFLATVGVSPDHQGKGLGSAVVLPGVEAAERAGVPAFLETSAPRNLPFYERLGFTVTADVEVPEGPRTWCMTRKPGA

SEQ ID NO: 2945 - protein, 954 aa, Artificial Sequence
  Synthetic Polypeptide
MALPVTALLLPLALLLHAARPDEIVLTQSPATLSLSPGERATLSCSASSSVSYMHWYQQKPGQAPRLLIYDTSKLASGIPARFSGSGSGTDFTLTISSLEPEDVAVYYCFQGSVYPFTFGQGTKLEIKRGGGGSGGGGSGGGGSQVQLQESGPGLVKPSQTLSLTCTVSGGSISTSGMGVGWIRQHPGKGLEWIGHIWWDDDKRYNPALKSRVTISVDTSKNQFSLKLSSVTAADTAVYYCARMELWSYYFDYWGQGTLVTVSSTREQKLISEEDLAKPTTTPAPRPPTPAPTIASQPLSLRPEACRPAAGGAVHTRGLDFACDIYIWAPLAGTCGVLLLSLVITLYCKRGRKKLLYIFKQPFMRPVQTTQEEDGCSCRFPEEEEGGCELRVKFSRSADAPAYQQGQNQLYNELNLGRREEYDVLDKRRGRDPEMGGKPRRKNPQEGLYNELQKDKMAEAYSEIGMKGERRRGKGHDGLYQGLSTATKDTYDALHMQALPPRSRGSGATNFSLLKQAGDVEENPGPGIHMATYEVLCEVARKLGTDDREVVLFLLNVFIPQPTLAQLIGALRALKEEGRLTFPLLAECLFRAGRRDLLRDLLHLDPRFLERHLAGTMSYFSPYQLTVLHVDGELCARDIRSLIFLSKDTIGSRSTPQTFLHWVYCMENLDLLGPTDVDALMSMLRSLSRVDLQRQVQTLMGLHLSGPSHSQHYRHTPLETDFYDYKDDDDKTSGSGEGRGSLLTCGDVEENPGPHMTEYKPTVRLATRDDVPRAVRTLAAAFADYPATRHTVDPDRHIERVTELQELFLTRVGLDIGKVWVADDGAAVAVWTTPESVEAGAVFAEIGPRMAELSGSRLAAQQQMEGLLAPHRPKEPAWFLATVGVSPDHQGKGLGSAVVLPGVEAAERAGVPAFLETSAPRNLPFYERLGFTVTADVEVPEGPRTWCMTRKPGA

SEQ ID NO: 2946 - protein, 961 aa, Artificial Sequence
  Synthetic Polypeptide
MALPVTALLLPLALLLHAARPDIQLTQSPASLAVSLGQRATISCKASQSVDYDGDSYLNWYQQIPGQPPKLLIYDASNLVSGIPPRFSGSGSGTDFTLNIHPVEKVDAATYHCQQSTEDPWTFGGGTKLEIKGGGGSGGGGSGGGGSQVQLQQSGAELVRPGSSVKISCKASGYAFSSYWMNWVKQRPGQGLEWIGQIWPGDGDTNYNGKFKGKATLTADESSSTAYMQLSSLASEDSAVYFCARRETTTVGRYYYAMDYWGQGTTVTVSSTREQKLISEEDLAKPTTTPAPRPPTPAPTIASQPLSLRPEACRPAAGGAVHTRGLDFACDIYIWAPLAGTCGVLLLSLVITLYCKRGRKKLLYIFKQPFMRPVQTTQEEDGCSCRFPEEEEGGCELRVKFSRSADAPAYQQGQNQLYNELNLGRREEYDVLDKRRGRDPEMGGKPRRKNPQEGLYNELQKDKMAEAYSEIGMKGERRRGKGHDGLYQGLSTATKDTYDALHMQALPPRSRGSGATNFSLLKQAGDVEENPGPGIHMATYEVLCEVARKLGTDDREVVLFLLNVFIPQPTLAQLIGALRALKEEGRLTFPLLAECLFRAGRRDLLRDLLHLDPRFLERHLAGTMSYFSPYQLTVLHVDGELCARDIRSLIFLSKDTIGSRSTPQTFLHWVYCMENLDLLGPTDVDALMSMLRSLSRVDLQRQVQTLMGLHLSGPSHSQHYRHTPLETDFYDYKDDDDKTSGSGEGRGSLLTCGDVEENPGPHMTEYKPTVRLATRDDVPRAVRTLAAAFADYPATRHTVDPDRHIERVTELQELFLTRVGLDIGKVWVADDGAAVAVWTTPESVEAGAVFAEIGPRMAELSGSRLAAQQQMEGLLAPHRPKEPAWFLATVGVSPDHQGKGLGSAVVLPGVEAAERAGVPAFLETSAPRNLPFYERLGFTVTADVEVPEGPRTWCMTRKPGA

SEQ ID NO: 2947 - protein, 960 aa, Artificial Sequence
  Synthetic Polypeptide
MALPVTALLLPLALLLHAARPDIVMTQAAPSIPVTPGESVSISCRSSKSLLNSNGNTYLYWFLQRPGQSPQLLIYRMSNLASGVPDRFSGSGSGTAFTLRISRVEAEDVGVYYCMQHLEYPFTFGAGTKLELKRGGGGSGGGGSGGGGSEVQLQQSGPELIKPGASVKMSCKASGYTFTSYVMHWVKQKPGQGLEWIGYINPYNDGTKYNEKFKGKATLTSDKSSSTAYMELSSLTSEDSAVYYCARGTYYYGSRVFDYWGQGTTLTVSSTREQKLISEEDLAKPTTTPAPRPPTPAPTIASQPLSLRPEACRPAAGGAVHTRGLDFACDIYIWAPLAGTCGVLLLSLVITLYCKRGRKKLLYIFKQPFMRPVQTTQEEDGCSCRFPEEEEGGCELRVKFSRSADAPAYQQGQNQLYNELNLGRREEYDVLDKRRGRDPEMGGKPRRKNPQEGLYNELQKDKMAEAYSEIGMKGERRRGKGHDGLYQGLSTATKDTYDALHMQALPPRSRGSGATNFSLLKQAGDVEENPGPGIHMATYEVLCEVARKLGTDDREVVLFLLNVFIPQPTLAQLIGALRALKEEGRLTFPLLAECLFRAGRRDLLRDLLHLDPRFLERHLAGTMSYFSPYQLTVLHVDGELCARDIRSLIFLSKDTIGSRSTPQTFLHWVYCMENLDLLGPTDVDALMSMLRSLSRVDLQRQVQTLMGLHLSGPSHSQHYRHTPLETDFYDYKDDDDKTSGSGEGRGSLLTCGDVEENPGPHMTEYKPTVRLATRDDVPRAVRTLAAAFADYPATRHTVDPDRHIERVTELQELFLTRVGLDIGKVWVADDGAAVAVWTTPESVEAGAVFAEIGPRMAELSGSRLAAQQQMEGLLAPHRPKEPAWFLATVGVSPDHQGKGLGSAVVLPGVEAAERAGVPAFLETSAPRNLPFYERLGFTVTADVEVPEGPRTWCMTRKPGA

SEQ ID NO: 2948 - protein, 958 aa, Artificial Sequence
  Synthetic Polypeptide
MALPVTALLLPLALLLHAARPEIVLTQSPDFQSVTPKEKVTITCRASESVDTFGISFMNWFQQKPDQSPKLLIHAASNQGSGVPSRFSGSGSGTDFTLTINSLEAEDAATYYCQQSKEVPFTFGGGTKVEIKGGGGSGGGGSGGGGSEVQLVESGGGLVQPGGSLRLSCAASGFTFSSSWMNWVRQAPGKGLEWVGRIYPGDGDTNYNGKFKGRFTISRDDSKNSLYLQMNSLKTEDTAVYYCARSGFITTVLDFDYWGQGTLVTVSSTREQKLISEEDLAKPTTTPAPRPPTPAPTIASQPLSLRPEACRPAAGGAVHTRGLDFACDIYIWAPLAGTCGVLLLSLVITLYCKRGRKKLLYIFKQPFMRPVQTTQEEDGCSCRFPEEEEGGCELRVKFSRSADAPAYQQGQNQLYNELNLGRREEYDVLDKRRGRDPEMGGKPRRKNPQEGLYNELQKDKMAEAYSEIGMKGERRRGKGHDGLYQGLSTATKDTYDALHMQALPPRSRGSGATNFSLLKQAGDVEENPGPGIHMATYEVLCEVARKLGTDDREVVLFLLNVFIPQPTLAQLIGALRALKEEGRLTFPLLAECLFRAGRRDLLRDLLHLDPRFLERHLAGTMSYFSPYQLTVLHVDGELCARDIRSLIFLSKDTIGSRSTPQTFLHWVYCMENLDLLGPTDVDALMSMLRSLSRVDLQRQVQTLMGLHLSGPSHSQHYRHTPLETDFYDYKDDDDKTSGSGEGRGSLLTCGDVEENPGPHMTEYKPTVRLATRDDVPRAVRTLAAAFADYPATRHTVDPDRHIERVTELQELFLTRVGLDIGKVWVADDGAAVAVWTTPESVEAGAVFAEIGPRMAELSGSRLAAQQQMEGLLAPHRPKEPAWFLATVGVSPDHQGKGLGSAVVLPGVEAAERAGVPAFLETSAPRNLPFYERLGFTVTADVEVPEGPRTWCMTRKPGA

SEQ ID NO: 2949 - protein, 954 aa, Artificial Sequence
  Synthetic Polypeptide
MALPVTALLLPLALLLHAARPAIQLTQSPSSLSASVGDRVTITCRASQGISSAQQKPGKAPKLLILAWYSSLESGVPSRFSGYDASGSGTDFTLTISSLQPEDFATYYCQQFNSYPYTFGQGTKLEIKGGGGSGGGGSGGGGSEVQLVQSGAEVKKPGESLKISCKGSGYSFSSSWIGWVRQMPGKGLEWMGIIYPDDSDTRYSPSFQGQVTISADKSIRTAYLQWSSLKASDTAMYYCARHVTMIWGVIIDFWGQGTLVTVSSTREQKLISEEDLAKPTTTPAPRPPTPAPTIASQPLSLRPEACRPAAGGAVHTRGLDFACDIYIWAPLAGTCGVLLLSLVITLYCKRGRKKLLYIFKQPFMRPVQTTQEEDGCSCRFPEEEEGGCELRVKFSRSADAPAYQQGQNQLYNELNLGRREEYDVLDKRRGRDPEMGGKPRRKNPQEGLYNELQKDKMAEAYSEIGMKGERRRGKGHDGLYQGLSTATKDTYDALHMQALPPRSRGSGATNFSLLKQAGDVEENPGPGIHMATYEVLCEVARKLGTDDREVVLFLLNVFIPQPTLAQLIGALRALKEEGRLTFPLLAECLFRAGRRDLLRDLLHLDPRFLERHLAGTMSYFSPYQLTVLHVDGELCARDIRSLIFLSKDTIGSRSTPQTFLHWVYCMENLDLLGPTDVDALMSMLRSLSRVDLQRQVQTLMGLHLSGPSHSQHYRHTPLETDFYDYKDDDDKTSGSGEGRGSLLTCGDVEENPGPHMTEYKPTVRLATRDDVPRAVRTLAAAFADYPATRHTVDPDRHIERVTELQELFLTRVGLDIGKVWVADDGAAVAVWTTPESVEAGAVFAEIGPRMAELSGSRLAAQQQMEGLLAPHRPKEPAWFLATVGVSPDHQGKGLGSAVVLPGVEAAERAGVPAFLETSAPRNLPFYERLGFTVTADVEVPEGPRTWCMTRKPGA

SEQ ID NO: 2950 - protein, 978 aa, Artificial Sequence
  Synthetic Polypeptide
MALPVTALLLPLALLLHAARPINIYNAEPANPSEKNSPEFDIVMTQSPATLSLSPGERATLSCRSSKSLQNVNGNTYLYWFQQKPGQSPQLLIYRMSNLNSGVPDRFSGSGSGTEFTLTISSLEPEDFAVYYCMQHLEYPITFGAGTKLEIKGGGGSGGGGSGGGGSEVQLVESGGGLVKPGGSLKLSCAASGYTFTSYVMHWVRQAPGKGLEWIGYINPYNDGTKYNEKFQGRVTISSDKSISTAYMELSSLRSEDTAMYYCARGTYYYGTRVFDYWGQGTLVTVSSTREQKLISEEDLAKPTTTPAPRPPTPAPTIASQPLSLRPEACRPAAGGAVHTRGLDFACDIYIWAPLAGTCGVLLLSLVITLYCKRGRKKLLYIFKQPFMRPVQTTQEEDGCSCRFPEEEEGGCELRVKFSRSADAPAYQQGQNQLYNELNLGRREEYDVLDKRRGRDPEMGGKPRRKNPQEGLYNELQKDKMAEAYSEIGMKGERRRGKGHDGLYQGLSTATKDTYDALHMQALPPRSRGSGATNFSLLKQAGDVEENPGPGIHMATYEVLCEVARKLGTDDREVVLFLLNVFIPQPTLAQLIGALRALKEEGRLTFPLLAECLFRAGRRDLLRDLLHLDPRFLERHLAGTMSYFSPYQLTVLHVDGELCARDIRSLIFLSKDTIGSRSTPQTFLHWVYCMENLDLLGPTDVDALMSMLRSLSRVDLQRQVQTLMGLHLSGPSHSQHYRHTPLETDFYDYKDDDDKTSGSGEGRGSLLTCGDVEENPGPHMTEYKPTVRLATRDDVPRAVRTLAAAFADYPATRHTVDPDRHIERVTELQELFLTRVGLDIGKVWVADDGAAVAVWTTPESVEAGAVFAEIGPRMAELSGSRLAAQQQMEGLLAPHRPKEPAWFLATVGVSPDHQGKGLGSAVVLPGVEAAERAGVPAFLETSAPRNLPFYERLGFTVTADVEVPEGPRTWCMTRKPGA

SEQ ID NO: 2951 - protein, 960 aa, Artificial Sequence
  Synthetic Polypeptide
MALPVTALLLPLALLLHAARPDILLTQSPATLSLSPGERATLSCRASQSVDYDGDSYLNWYQQKPGQPPKLLIYDASNLVSGIPPRFSGSGSGTDFTLTISRLEPEDFAVYHCQQSTEDPWTFGGGTKLEIKGGGGSGGGGSGGGGSQVQLVESGGGLVEPGGSLRLSCMSGYAFSSYWMNWVRQMPGKGLEWMGQIWPGDGDTNYNPSLKSRVTITADESTSTAYMELSSLKAEDTAVYFCARRETTTVGRYYYAMDYWGQGTLVTVSSTREQKLISEEDLAKPTTTPAPRPPTPAPTIASQPLSLRPEACRPAAGGAVHTRGLDFACDIYIWAPLAGTCGVLLLSLVITLYCKRGRKKLLYIFKQPFMRPVQTTQEEDGCSCRFPEEEEGGCELRVKFSRSADAPAYQQGQNQLYNELNLGRREEYDVLDKRRGRDPEMGGKPRRKNPQEGLYNELQKDKMAEAYSEIGMKGERRRGKGHDGLYQGLSTATKDTYDALHMQALPPRSRGSGATNFSLLKQAGDVEENPGPGIHMATYEVLCEVARKLGTDDREVVLFLLNVFIPQPTLAQLIGALRALKEEGRLTFPLLAECLFRAGRRDLLRDLLHLDPRFLERHLAGTMSYFSPYQLTVLHVDGELCARDIRSLIFLSKDTIGSRSTPQTFLHWVYCMENLDLLGPTDVDALMSMLRSLSRVDLQRQVQTLMGLHLSGPSHSQHYRHTPLETDFYDYKDDDDKTSGSGEGRGSLLTCGDVEENPGPHMTEYKPTVRLATRDDVPRAVRTLAAAFADYPATRHTVDPDRHIERVTELQELFLTRVGLDIGKVWVADDGAAVAVWTTPESVEAGAVFAEIGPRMAELSGSRLAAQQQMEGLLAPHRPKEPAWFLATVGVSPDHQGKGLGSAVVLPGVEAAERAGVPAFLETSAPRNLPFYERLGFTVTADVEVPEGPRTWCMTRKPGA

SEQ ID NO: 2952 - protein, 957 aa, Artificial Sequence
  Synthetic Polypeptide
MALPVTALLLPLALLLHAARPDILLTQSPATLSLSPGERATLSCRASQSVDNYGISFMNWYQQKPGQPPKLLIYAASNQGSGIPSRFSGSGSGTDFTLTISSLEPEDFAMYFCQQSNEVPRTFGGGTKLEIKGGGGSGGGGSGGGGSQVQLVESGGGLVEPGGSLRLSCMSGYAFSSSWMNWVRQMPGKGLEWMGRIYPGDGDTNYNGKFKERVTITADESTSTAYMELSSLKAEDTAVYFCARSEYWGNYWAMDYWGQGTLVTVSSTREQKLISEEDLAKPTTTPAPRPPTPAPTIASQPLSLRPEACRPAAGGAVHTRGLDFACDIYIWAPLAGTCGVLLLSLVITLYCKRGRKKLLYIFKQPFMRPVQTTQEEDGCSCRFPEEEEGGCELRVKFSRSADAPAYQQGQNQLYNELNLGRREEYDVLDKRRGRDPEMGGKPRRKNPQEGLYNELQKDKMAEAYSEIGMKGERRRGKGHDGLYQGLSTATKDTYDALHMQALPPRSRGSGATNFSLLKQAGDVEENPGPGIHMATYEVLCEVARKLGTDDREVVLFLLNVFIPQPTLAQLIGALRALKEEGRLTFPLLAECLFRAGRRDLLRDLLHLDPRFLERHLAGTMSYFSPYQLTVLHVDGELCARDIRSLIFLSKDTIGSRSTPQTFLHWVYCMENLDLLGPTDVDALMSMLRSLSRVDLQRQVQTLMGLHLSGPSHSQHYRHTPLETDFYDYKDDDDKTSGSGEGRGSLLTCGDVEENPGPHMTEYKPTVRLATRDDVPRAVRTLAAAFADYPATRHTVDPDRHIERVTELQELFLTRVGLDIGKVWVADDGAAVAVWTTPESVEAGAVFAEIGPRMAELSGSRLAAQQQMEGLLAPHRPKEPAWFLATVGVSPDHQGKGLGSAVVLPGVEAAERAGVPAFLETSAPRNLPFYERLGFTVTADVEVPEGPRTWCMTRKPGA

SEQ ID NO: 2953 - protein, 956 aa, Artificial Sequence
  Synthetic Polypeptide
MALPVTALLLPLALLLHAARPDILLTQSPATLSLSPGERATLSCKASQNVGTNVAWYQQKPGQPPKLLIYSATYRNSGIPARFSGSGSGTEFTLTITNVQSKDLADYFYFCQYNRYPYTSGGGTKLEIKRGGGGSGGGGSGGGGSQVQLVESGGGLVEPGGSLRLSCMSGYAFSSYWMNWVRQMPGKGLEWMGQIYPGDGDTNYNGKFKGRVTITADESTSTAYMELSSLKAEDTAVYFCARKTISSVVDFYFDNWGQGTLVTVSSTREQKLISEEDLAKPTTTPAPRPPTPAPTIASQPLSLRPEACRPAAGGAVHTRGLDFACDIYIWAPLAGTCGVLLLSLVITLYCKRGRKKLLYIFKQPFMRPVQTTQEEDGCSCRFPEEEEGGCELRVKFSRSADAPAYQQGQNQLYNELNLGRREEYDVLDKRRGRDPEMGGKPRRKNPQEGLYNELQKDKMAEAYSEIGMKGERRRGKGHDGLYQGLSTATKDTYDALHMQALPPRSRGSGATNFSLLKQAGDVEENPGPGIHMATYEVLCEVARKLGTDDREVVLFLLNVFIPQPTLAQLIGALRALKEEGRLTFPLLAECLFRAGRRDLLRDLLHLDPRFLERHLAGTMSYFSPYQLTVLHVDGELCARDIRSLIFLSKDTIGSRSTPQTFLHWVYCMENLDLLGPTDVDALMSMLRSLSRVDLQRQVQTLMGLHLSGPSHSQHYRHTPLETDFYDYKDDDDKTSGSGEGRGSLLTCGDVEENPGPHMTEYKPTVRLATRDDVPRAVRTLAAAFADYPATRHTVDPDRHIERVTELQELFLTRVGLDIGKVWVADDGAAVAVWTTPESVEAGAVFAEIGPRMAELSGSRLAAQQQMEGLLAPHRPKEPAWFLATVGVSPDHQGKGLGSAVVLPGVEAAERAGVPAFLETSAPRNLPFYERLGFTVTADVEVPEGPRTWCMTRKPGA

SEQ ID NO: 2954 - protein, 969 aa, Artificial Sequence
  Synthetic Polypeptide
MALPVTALLLPLALLLHAARPINIYNAEPANPSEKNSPEFQIVLTQSPATLSASPGEKATMTCSASSGVNYMHWYQQKPGTSPKRWIYDTDKTASGVPARFSGSGSGTSYSLTISSMEAEDAATYYCHQRGSYTFGGGTKLEIKGGGGSGGGGSGGGGSQVQLEQPGAEVVKPGASVKVSCKTSGYTFTSNWMHWVKQTPGKGLEWIGEIDPSDSYTNYNQKFDGKAKLTVDKSSSTAYMEVSDLTAEDSATYYCARGSNPYYYAMDYWGQGTSVTVSSTREQKLISEEDLAKPTTTPAPRPPTPAPTIASQPLSLRPEACRPAAGGAVHTRGLDFACDIYIWAPLAGTCGVLLLSLVITLYCKRGRKKLLYIFKQPFMRPVQTTQEEDGCSCRFPEEEEGGCELRVKFSRSADAPAYQQGQNQLYNELNLGRREEYDVLDKRRGRDPEMGGKPRRKNPQEGLYNELQKDKMAEAYSEIGMKGERRRGKGHDGLYQGLSTATKDTYDALHMQALPPRSRGSGATNFSLLKQAGDVEENPGPGIHMATYEVLCEVARKLGTDDREVVLFLLNVFIPQPTLAQLIGALRALKEEGRLTFPLLAECLFRAGRRDLLRDLLHLDPRFLERHLAGTMSYFSPYQLTVLHVDGELCARDIRSLIFLSKDTIGSRSTPQTFLHWVYCMENLDLLGPTDVDALMSMLRSLSRVDLQRQVQTLMGLHLSGPSHSQHYRHTPLETDFYDYKDDDDKTSGSGEGRGSLLTCGDVEENPGPHMTEYKPTVRLATRDDVPRAVRTLAAAFADYPATRHTVDPDRHIERVTELQELFLTRVGLDIGKVWVADDGAAVAVWTTPESVEAGAVFAEIGPRMAELSGSRLAAQQQMEGLLAPHRPKEPAWFLATVGVSPDHQGKGLGSAVVLPGVEAAERAGVPAFLETSAPRNLPFYERLGFTVTADVEVPEGPRTWCMTRKPGA

SEQ ID NO: 2955 - protein, 955 aa, Artificial Sequence
  Synthetic Polypeptide
MALPVTALLLPLALLLHAARPDIQMTQSPSSLSASVGDRVTITCKASDHINNWLAWYQQKPGQAPKLLIYGATTLETGVPSRFSGSGSGTDYTLTISSLQPEDFATYYCQQSWNTPWTFGQGTKLEIKRGGGGSGGGGSGGGGSQVQLQQPGAELVKPGASVKMSCKASGYAFSSYWINWMKQKPGQGLEWIGQIYPGDGDTNYNGKFKGRATLTADTSSSTAYMQLSSLTSEDSAVYFCARSITTVVGCAMDYWGQGTSVTVSSTREQKLISEEDLAKPTTTPAPRPPTPAPTIASQPLSLRPEACRPAAGGAVHTRGLDFACDIYIWAPLAGTCGVLLLSLVITLYCKRGRKKLLYIFKQPFMRPVQTTQEEDGCSCRFPEEEEGGCELRVKFSRSADAPAYQQGQNQLYNELNLGRREEYDVLDKRRGRDPEMGGKPRRKNPQEGLYNELQKDKMAEAYSEIGMKGERRRGKGHDGLYQGLSTATKDTYDALHMQALPPRSRGSGATNFSLLKQAGDVEENPGPGIHMATYEVLCEVARKLGTDDREVVLFLLNVFIPQPTLAQLIGALRALKEEGRLTFPLLAECLFRAGRRDLLRDLLHLDPRFLERHLAGTMSYFSPYQLTVLHVDGELCARDIRSLIFLSKDTIGSRSTPQTFLHWVYCMENLDLLGPTDVDALMSMLRSLSRVDLQRQVQTLMGLHLSGPSHSQHYRHTPLETDFYDYKDDDDKTSGSGEGRGSLLTCGDVEENPGPHMTEYKPTVRLATRDDVPRAVRTLAAAFADYPATRHTVDPDRHIERVTELQELFLTRVGLDIGKVWVADDGAAVAVWTTPESVEAGAVFAEIGPRMAELSGSRLAAQQQMEGLLAPHRPKEPAWFLATVGVSPDHQGKGLGSAVVLPGVEAAERAGVPAFLETSAPRNLPFYERLGFTVTADVEVPEGPRTWCMTRKPGA

SEQ ID NO: 2956 - protein, 963 aa, Artificial Sequence
  Synthetic Polypeptide
MALPVTALLLPLALLLHAARPDDIQLTQSPSSLSASVGDRVTITCKASQSVDYDGDSYLNWYQQIPGKAPKLLIYDASNLVSGIPPRFSGSGSGTDYTFTISSLQPEDIATYHCQQSTEDPWTFGGGTKLQIKRGGGGSGGGGSGGGGSQVQLQQSGAEVKKPGSSVKVSCKASGYAFSSYWMNWVRQRPGQGLEWIGQIWPGDGDTNYNGKFKGRATITADESTNTAYMELSSLRSEDTAFYSCARRETTTVGRYYYAMDYWGQGTTVTVSSTREQKLISEEDLAKPTTTPAPRPPTPAPTIASQPLSLRPEACRPAAGGAVHTRGLDFACDIYIWAPLAGTCGVLLLSLVITLYCKRGRKKLLYIFKQPFMRPVQTTQEEDGCSCRFPEEEEGGCELRVKFSRSADAPAYQQGQNQLYNELNLGRREEYDVLDKRRGRDPEMGGKPRRKNPQEGLYNELQKDKMAEAYSEIGMKGERRRGKGHDGLYQGLSTATKDTYDALHMQALPPRSRGSGATNFSLLKQAGDVEENPGPGIHMATYEVLCEVARKLGTDDREVVLFLLNVFIPQPTLAQLIGALRALKEEGRLTFPLLAECLFRAGRRDLLRDLLHLDPRFLERHLAGTMSYFSPYQLTVLHVDGELCARDIRSLIFLSKDTIGSRSTPQTFLHWVYCMENLDLLGPTDVDALMSMLRSLSRVDLQRQVQTLMGLHLSGPSHSQHYRHTPLETDFYDYKDDDDKTSGSGEGRGSLLTCGDVEENPGPHMTEYKPTVRLATRDDVPRAVRTLAAAFADYPATRHTVDPDRHIERVTELQELFLTRVGLDIGKVWVADDGAAVAVWTTPESVEAGAVFAEIGPRMAELSGSRLAAQQQMEGLLAPHRPKEPAWFLATVGVSPDHQGKGLGSAVVLPGVEAAERAGVPAFLETSAPRNLPFYERLGFTVTADVEVPEGPRTWCMTRKPGA

SEQ ID NO: 2957 - protein, 954 aa, Artificial Sequence
  Synthetic Polypeptide
MALPVTALLLPLALLLHAARPQSVLTQPASVSGSPGQSITISCTGTSSDVGGYNYVSWYQQHPGKAPKLMIYDVNNRPSEVSNRFSGSKSGNTASLTISGLQAEDEADYYCSSYTTGSRAVFGGGTKLTVLGGGGGSGGGGSGGGGSEVQLVQSGAEVKKPGESLTISCKASGYSFPNYWITWVRQMSGGGLEWMGRIDPGDSYTTYNPSFQGHVTISIDKSTNTAYLHWNSLKASDTAMYYCARYYVSLVDIWGQGTLVTVSSTREQKLISEEDLAKPTTTPAPRPPTPAPTIASQPLSLRPEACRPAAGGAVHTRGLDFACDIYIWAPLAGTCGVLLLSLVITLYCKRGRKKLLYIFKQPFMRPVQTTQEEDGCSCRFPEEEEGGCELRVKFSRSADAPAYQQGQNQLYNELNLGRREEYDVLDKRRGRDPEMGGKPRRKNPQEGLYNELQKDKMAEAYSEIGMKGERRRGKGHDGLYQGLSTATKDTYDALHMQALPPRSRGSGATNFSLLKQAGDVEENPGPGIHMATYEVLCEVARKLGTDDREVVLFLLNVFIPQPTLAQLIGALRALKEEGRLTFPLLAECLFRAGRRDLLRDLLHLDPRFLERHLAGTMSYFSPYQLTVLHVDGELCARDIRSLIFLSKDTIGSRSTPQTFLHWVYCMENLDLLGPTDVDALMSMLRSLSRVDLQRQVQTLMGLHLSGPSHSQHYRHTPLETDFYDYKDDDDKTSGSGEGRGSLLTCGDVEENPGPHMTEYKPTVRLATRDDVPRAVRTLAAAFADYPATRHTVDPDRHIERVTELQELFLTRVGLDIGKVWVADDGAAVAVWTTPESVEAGAVFAEIGPRMAELSGSRLAAQQQMEGLLAPHRPKEPAWFLATVGVSPDHQGKGLGSAVVLPGVEAAERAGVPAFLETSAPRNLPFYERLGFTVTADVEVPEGPRTWCMTRKPGA

SEQ ID NO: 2958 - protein, 960 aa, Artificial Sequence
  Synthetic Polypeptide
MALPVTALLLPLALLLHAARPQSVVTQPPSVSAAPGQKVTISCSGSSSNIGNNYVSWYQQLPGTAPKLLIYDNNKRPSGIPDRFSGSKSGTSATLGITGLQTGDEADYYCGTWDGSLYTMLFGGGTKLTVLGGGGSGGGGSGGGGSEVQLVESGGGLVKPGGSLRLSCAASGFTFSNAWMSWVRQAPGKGLEWVGFIRSKAYGGTTEYAASVKGRFTISRDDSKSIAYLQMNNLKTEDTAVYYCARDGLYSSSWYDSDYWGQGTLVTVSSTREQKLISEEDLAKPTTTPAPRPPTPAPTIASQPLSLRPEACRPAAGGAVHTRGLDFACDIYIWAPLAGTCGVLLLSLVITLYCKRGRKKLLYIFKQPFMRPVQTTQEEDGCSCRFPEEEEGGCELRVKFSRSADAPAYQQGQNQLYNELNLGRREEYDVLDKRRGRDPEMGGKPRRKNPQEGLYNELQKDKMAEAYSEIGMKGERRRGKGHDGLYQGLSTATKDTYDALHMQALPPRSRGSGATNFSLLKQAGDVEENPGPGIHMATYEVLCEVARKLGTDDREVVLFLLNVFIPQPTLAQLIGALRALKEEGRLTFPLLAECLFRAGRRDLLRDLLHLDPRFLERHLAGTMSYFSPYQLTVLHVDGELCARDIRSLIFLSKDTIGSRSTPQTFLHWVYCMENLDLLGPTDVDALMSMLRSLSRVDLQRQVQTLMGLHLSGPSHSQHYRHTPLETDFYDYKDDDDKTSGSGEGRGSLLTCGDVEENPGPHMTEYKPTVRLATRDDVPRAVRTLAAAFADYPATRHTVDPDRHIERVTELQELFLTRVGLDIGKVWVADDGAAVAVWTTPESVEAGAVFAEIGPRMAELSGSRLAAQQQMEGLLAPHRPKEPAWFLATVGVSPDHQGKGLGSAVVLPGVEAAERAGVPAFLETSAPRNLPFYERLGFTVTADVEVPEGPRTWCMTRKPGA

SEQ ID NO: 2959 - protein, 965 aa, Artificial Sequence
  Synthetic Polypeptide
MALPVTALLLPLALLLHAARPQSVLTQPPSVSGAPGQRVTISCTGSSSNIGAGYDVHWYQQLPGTAPKLLIFGNSNRPSGVPDRFSGFKSGTSASLAITGLQAEDEADYFCQSYDSSLSGSGVFGTGTKVTVLGGGGGSGGGGSGGGGSQMQLVQSGGGLVQPGRSLRLSCAASGFTFDDYAMHWVRQAPGKGLEWVSGISWNSGSIGYADSVKGRFTISRDNAKNSLYLQMNSLRAEDTALYYCAKDIHSGSYYGLLYYAMDVWGQGTTVTVSSTREQKLISEEDLAKPTTTPAPRPPTPAPTIASQPLSLRPEACRPAAGGAVHTRGLDFACDIYIWAPLAGTCGVLLLSLVITLYCKRGRKKLLYIFKQPFMRPVQTTQEEDGCSCRFPEEEEGGCELRVKFSRSADAPAYQQGQNQLYNELNLGRREEYDVLDKRRGRDPEMGGKPRRKNPQEGLYNELQKDKMAEAYSEIGMKGERRRGKGHDGLYQGLSTATKDTYDALHMQALPPRSRGSGATNFSLLKQAGDVEENPGPGIHMATYEVLCEVARKLGTDDREVVLFLLNVFIPQPTLAQLIGALRALKEEGRLTFPLLAECLFRAGRRDLLRDLLHLDPRFLERHLAGTMSYFSPYQLTVLHVDGELCARDIRSLIFLSKDTIGSRSTPQTFLHWVYCMENLDLLGPTDVDALMSMLRSLSRVDLQRQVQTLMGLHLSGPSHSQHYRHTPLETDFYDYKDDDDKTSGSGEGRGSLLTCGDVEENPGPHMTEYKPTVRLATRDDVPRAVRTLAAAFADYPATRHTVDPDRHIERVTELQELFLTRVGLDIGKVWVADDGAAVAVWTTPESVEAGAVFAEIGPRMAELSGSRLAAQQQMEGLLAPHRPKEPAWFLATVGVSPDHQGKGLGSAVVLPGVEAAERAGVPAFLETSAPRNLPFYERLGFTVTADVEVPEGPRTWCMTRKPGA

SEQ ID NO: 2960 - protein, 952 aa, Artificial Sequence
  Synthetic Polypeptide
MALPVTALLLPLALLLHAARPDYIHVTQSPSSLSVSIGDRVTINCQTSQGVGSDLHWYQHKPGRAPKLLIHHASSVEDGVPSRFSGTGFHTSFNLTINDLQADDIGTYYCQVLQSFGRGSRLDTKGGGGSGGGGSGGGGSRAHLVQSGTAMKKPGASVRVSCQTSGYTFTAHILFWFRQAPGRGLEWVGWIKPQYGAVNFGGGFRDRVTLTRDVYREIAYMDIRGLKPDDTAVYYCARDRSYGDSSWALDAWGQGTTVVVSATREQKLISEEDLAKPTTTPAPRPPTPAPTIASQPLSLRPEACRPAAGGAVHTRGLDFACDIYIWAPLAGTCGVLLLSLVITLYCKRGRKKLLYIFKQPFMRPVQTTQEEDGCSCRFPEEEEGGCELRVKFSRSADAPAYQQGQNQLYNELNLGRREEYDVLDKRRGRDPEMGGKPRRKNPQEGLYNELQKDKMAEAYSEIGMKGERRRGKGHDGLYQGLSTATKDTYDALHMQALPPRSRGSGATNFSLLKQAGDVEENPGPGIHMATYEVLCEVARKLGTDDREVVLFLLNVFIPQPTLAQLIGALRALKEEGRLTFPLLAECLFRAGRRDLLRDLLHLDPRFLERHLAGTMSYFSPYQLTVLHVDGELCARDIRSLIFLSKDTIGSRSTPQTFLHWVYCMENLDLLGPTDVDALMSMLRSLSRVDLQRQVQTLMGLHLSGPSHSQHYRHTPLETDFYDYKDDDDKTSGSGEGRGSLLTCGDVEENPGPHMTEYKPTVRLATRDDVPRAVRTLAAAFADYPATRHTVDPDRHIERVTELQELFLTRVGLDIGKVWVADDGAAVAVWTTPESVEAGAVFAEIGPRMAELSGSRLAAQQQMEGLLAPHRPKEPAWFLATVGVSPDHQGKGLGSAVVLPGVEAAERAGVPAFLETSAPRNLPFYERLGFTVTADVEVPEGPRTWCMTRKPGA

SEQ ID NO: 2961 - protein, 962 aa, Artificial Sequence
  Synthetic Polypeptide
MALPVTALLLPLALLLHAARPDVQMIQTPDSLAVSLGQRATISCRASESVDNYGISFMHWYQQKPGQSPKLLIYRASNLESGIPARFSGSGSRTDFTLTINPVETDDVATYYCQQNNKDPPTFGGGTKLEIKGGGGSGGGGSGGGGSGGGGSQVQLQQSGAELVKPGASVKISCKASGYAFSSYWMNWVKQRPGKGLEWIGQIYPGDGDTTYNGKFKGKATLTADKSSSTVYMQLNSLTSEDSAVYFCVRYYYGSSGYFDYWGQGTTLTVSSTREQKLISEEDLAKPTTTPAPRPPTPAPTIASQPLSLRPEACRPAAGGAVHTRGLDFACDIYIWAPLAGTCGVLLLSLVITLYCKRGRKKLLYIFKQPFMRPVQTTQEEDGCSCRFPEEEEGGCELRVKFSRSADAPAYQQGQNQLYNELNLGRREEYDVLDKRRGRDPEMGGKPRRKNPQEGLYNELQKDKMAEAYSEIGMKGERRRGKGHDGLYQGLSTATKDTYDALHMQALPPRSRGSGATNFSLLKQAGDVEENPGPGIHMATYEVLCEVARKLGTDDREVVLFLLNVFIPQPTLAQLIGALRALKEEGRLTFPLLAECLFRAGRRDLLRDLLHLDPRFLERHLAGTMSYFSPYQLTVLHVDGELCARDIRSLIFLSKDTIGSRSTPQTFLHWVYCMENLDLLGPTDVDALMSMLRSLSRVDLQRQVQTLMGLHLSGPSHSQHYRHTPLETDFYDYKDDDDKTSGSGEGRGSLLTCGDVEENPGPHMTEYKPTVRLATRDDVPRAVRTLAAAFADYPATRHTVDPDRHIERVTELQELFLTRVGLDIGKVWVADDGAAVAVWTTPESVEAGAVFAEIGPRMAELSGSRLAAQQQMEGLLAPHRPKEPAWFLATVGVSPDHQGKGLGSAVVLPGVEAAERAGVPAFLETSAPRNLPFYERLGFTVTADVEVPEGPRTWCMTRKPGA

SEQ ID NO: 2962 - protein, 953 aa, Artificial Sequence
  Synthetic Polypeptide
MALPVTALLLPLALLLHAARPDVQMIQTPSSLSASLGDRVTISCRASQDIGNYLNWYQQKPDGTVKLLIYYTSRLHSGVPSRFSGSGSGTEYSLTISNLEQEDIATYFCQQGSALPPTFGGGTKLEINGGGGSGGGGSGGGGSALQLQQSGAELVRPGASVTLSCKASGYTFTDYEMHWVKQTPVHGLEWIGAIDPETGGTAYNQKFEGKAILTADKSSSTAYMELRSLTSEDSPVYYCARRRYYGSSSFDYWGQGTTLTVSSTREQKLISEEDLAKPTTTPAPRPPTPAPTIASQPLSLRPEACRPAAGGAVHTRGLDFACDIYIWAPLAGTCGVLLLSLVITLYCKRGRKKLLYIFKQPFMRPVQTTQEEDGCSCRFPEEEEGGCELRVKFSRSADAPAYQQGQNQLYNELNLGRREEYDVLDKRRGRDPEMGGKPRRKNPQEGLYNELQKDKMAEAYSEIGMKGERRRGKGHDGLYQGLSTATKDTYDALHMQALPPRSRGSGATNFSLLKQAGDVEENPGPGIHMATYEVLCEVARKLGTDDREVVLFLLNVFIPQPTLAQLIGALRALKEEGRLTFPLLAECLFRAGRRDLLRDLLHLDPRFLERHLAGTMSYFSPYQLTVLHVDGELCARDIRSLIFLSKDTIGSRSTPQTFLHWVYCMENLDLLGPTDVDALMSMLRSLSRVDLQRQVQTLMGLHLSGPSHSQHYRHTPLETDFYDYKDDDDKTSGSGEGRGSLLTCGDVEENPGPHMTEYKPTVRLATRDDVPRAVRTLAAAFADYPATRHTVDPDRHIERVTELQELFLTRVGLDIGKVWVADDGAAVAVWTTPESVEAGAVFAEIGPRMAELSGSRLAAQQQMEGLLAPHRPKEPAWFLATVGVSPDHQGKGLGSAVVLPGVEAAERAGVPAFLETSAPRNLPFYERLGFTVTADVEVPEGPRTWCMTRKPGA

SEQ ID NO: 2963 - protein, 960 aa, Artificial Sequence
  Synthetic Polypeptide
MRLPAQLLGLLMLWVSGSSGDVVMTQSPLSLPVTPGAPASISCRSSQSIVHSNGNTYLEWYLQKPGQSPKLLIYKVSNRFSGVPDRFSGSGSGTDFTLRISRVEAEDVGIYYCFQGSHVPPTFGPGTKLEIKGGGGSGGGGSGGGGSEVQLVESGGGLVQPGGSLRLSCSASGFTFSSFGMHWVRQAPGKGLEWVAYISSGSSTIYYGDTVKGRFTISRDNAKNSLFLQMSSLRAEDTAVYYCAREGGYYYGRSYYTMDYWGQGTTVTVSTREQKLISEEDLAKPTTTPAPRPPTPAPTIASQPLSLRPEACRPAAGGAVHTRGLDFACDIYIWAPLAGTCGVLLLSLVITLYCKRGRKKLLYIFKQPFMRPVQTTQEEDGCSCRFPEEEEGGCELRVKFSRSADAPAYQQGQNQLYNELNLGRREEYDVLDKRRGRDPEMGGKPRRKNPQEGLYNELQKDKMAEAYSEIGMKGERRRGKGHDGLYQGLSTATKDTYDALHMQALPPRSRGSGATNFSLLKQAGDVEENPGPGIHMATYEVLCEVARKLGTDDREVVLFLLNVFIPQPTLAQLIGALRALKEEGRLTFPLLAECLFRAGRRDLLRDLLHLDPRFLERHLAGTMSYFSPYQLTVLHVDGELCARDIRSLIFLSKDTIGSRSTPQTFLHWVYCMENLDLLGPTDVDALMSMLRSLSRVDLQRQVQTLMGLHLSGPSHSQHYRHTPLETDFYDYKDDDDKTSGSGEGRGSLLTCGDVEENPGPHMTEYKPTVRLATRDDVPRAVRTLAAAFADYPATRHTVDPDRHIERVTELQELFLTRVGLDIGKVWVADDGAAVAVWTTPESVEAGAVFAEIGPRMAELSGSRLAAQQQMEGLLAPHRPKEPAWFLATVGVSPDHQGKGLGSAVVLPGVEAAERAGVPAFLETSAPRNLPFYERLGFTVTADVEVPEGPRTWCMTRKPGA

SEQ ID NO: 2964 - protein, 985 aa, Artificial Sequence
  Synthetic Polypeptide
MALPVTALLLPLALLLHAARPARKRTQPTFGFTVNWKFSESTTVFTGQCFIDRNGKEVLKTMWLLRSSVNDIGDDWKATRVGINIFTRLRTQKEGGSGGSARKCSLTGKWTNDLGSNMTIGAVNSRGEFTGTYITAVTATSNEIKESPLHGTQNTINKSGGSTTVFTGQCFIDRNGKEVLKTMWLLRSSVNDIGDDWKATRVGINIFTRLRTQKEGGSGGSARKCSLTGKWTNDLGSNMTIGAVNSRGEFTGTYITAVTATSNEIKESPLHGTQNTINKRTQPTFGFTVNWKFSETREQKLISEEDLAKPTTTPAPRPPTPAPTIASQPLSLRPEACRPAAGGAVHTRGLDFACDIYIWAPLAGTCGVLLLSLVITLYCKRGRKKLLYIFKQPFMRPVQTTQEEDGCSCRFPEEEEGGCELRVKFSRSADAPAYQQGQNQLYNELNLGRREEYDVLDKRRGRDPEMGGKPRRKNPQEGLYNELQKDKMAEAYSEIGMKGERRRGKGHDGLYQGLSTATKDTYDALHMQALPPRSRGSGATNFSLLKQAGDVEENPGPGIHMATYEVLCEVARKLGTDDREVVLFLLNVFIPQPTLAQLIGALRALKEEGRLTFPLLAECLFRAGRRDLLRDLLHLDPRFLERHLAGTMSYFSPYQLTVLHVDGELCARDIRSLIFLSKDTIGSRSTPQTFLHWVYCMENLDLLGPTDVDALMSMLRSLSRVDLQRQVQTLMGLHLSGPSHSQHYRHTPLETDFYDYKDDDDKTSGSGEGRGSLLTCGDVEENPGPHMTEYKPTVRLATRDDVPRAVRTLAAAFADYPATRHTVDPDRHIERVTELQELFLTRVGLDIGKVWVADDGAAVAVWTTPESVEAGAVFAEIGPRMAELSGSRLAAQQQMEGLLAPHRPKEPAWFLATVGVSPDHQGKGLGSAVVLPGVEAAERAGVPAFLETSAPRNLPFYERLGFTVTADVEVPEGPRTWCMTRKPGA

SEQ ID NO: 2965 - protein, 957 aa, Artificial Sequence
  Synthetic Polypeptide
MALPVTALLLPLALLLHAARPDIVLTQSPASLAVSLGQRATISCRASKSVSTSGYSYLHWYQQKPGQPPKLLIYLASNLESGVPARFSGSGSGTDFTLNIHPVEEEDAATYYCQHSRELPFTFGSGTKLEIKGGGGSGGGGSGGGGSQVQLVESGGGLVQPGGSLKLSCAASGFDFSRYWMSWVRQAPGKGLEWIGEINPTSSTINFTPSLKDKVFISRDNAKNTLYLQMSKVRSEDTALYYCARGNYYRYGDAMDYWGQGTSVTVSTREQKLISEEDLAKPTTTPAPRPPTPAPTIASQPLSLRPEACRPAAGGAVHTRGLDFACDIYIWAPLAGTCGVLLLSLVITLYCKRGRKKLLYIFKQPFMRPVQTTQEEDGCSCRFPEEEEGGCELRVKFSRSADAPAYQQGQNQLYNELNLGRREEYDVLDKRRGRDPEMGGKPRRKNPQEGLYNELQKDKMAEAYSEIGMKGERRRGKGHDGLYQGLSTATKDTYDALHMQALPPRSRGSGATNFSLLKQAGDVEENPGPGIHMATYEVLCEVARKLGTDDREVVLFLLNVFIPQPTLAQLIGALRALKEEGRLTFPLLAECLFRAGRRDLLRDLLHLDPRFLERHLAGTMSYFSPYQLTVLHVDGELCARDIRSLIFLSKDTIGSRSTPQTFLHWVYCMENLDLLGPTDVDALMSMLRSLSRVDLQRQVQTLMGLHLSGPSHSQHYRHTPLETDFYDYKDDDDKTSGSGEGRGSLLTCGDVEENPGPHMTEYKPTVRLATRDDVPRAVRTLAAAFADYPATRHTVDPDRHIERVTELQELFLTRVGLDIGKVWVADDGAAVAVWTTPESVEAGAVFAEIGPRMAELSGSRLAAQQQMEGLLAPHRPKEPAWFLATVGVSPDHQGKGLGSAVVLPGVEAAERAGVPAFLETSAPRNLPFYERLGFTVTADVEVPEGPRTWCMTRKPGA

SEQ ID NO: 2966 - protein, 955 aa, Artificial Sequence
  Synthetic Polypeptide
MALPVTALLLPLALLLHAARPDIQMTQSPSSLSASVGDRVTITCSASQDISNYLNWYQQKPGKAPKLLIYYTSNLHSGVPSRFSGSGSGTDFTLTISSLQPEDFATYYCQQYRKLPWTFGQGTKLEIKRGGGGSGGGGSGGGGSQVQLVQSGAEVKKPGSSVKVSCKASGGTFSNYWMHWVRQAPGQGLEWMGATYRGHSDTYYNQKFKGRVTITADKSTSTAYMELSSLRSEDTAVYYCARGAIYDGYDVLDNWGQGTLVTVSSTREQKLISEEDLAKPTTTPAPRPPTPAPTIASQPLSLRPEACRPAAGGAVHTRGLDFACDIYIWAPLAGTCGVLLLSLVITLYCKRGRKKLLYIFKQPFMRPVQTTQEEDGCSCRFPEEEEGGCELRVKFSRSADAPAYQQGQNQLYNELNLGRREEYDVLDKRRGRDPEMGGKPRRKNPQEGLYNELQKDKMAEAYSEIGMKGERRRGKGHDGLYQGLSTATKDTYDALHMQALPPRSRGSGATNFSLLKQAGDVEENPGPGIHMATYEVLCEVARKLGTDDREVVLFLLNVFIPQPTLAQLIGALRALKEEGRLTFPLLAECLFRAGRRDLLRDLLHLDPRFLERHLAGTMSYFSPYQLTVLHVDGELCARDIRSLIFLSKDTIGSRSTPQTFLHWVYCMENLDLLGPTDVDALMSMLRSLSRVDLQRQVQTLMGLHLSGPSHSQHYRHTPLETDFYDYKDDDDKTSGSGEGRGSLLTCGDVEENPGPHMTEYKPTVRLATRDDVPRAVRTLAAAFADYPATRHTVDPDRHIERVTELQELFLTRVGLDIGKVWVADDGAAVAVWTTPESVEAGAVFAEIGPRMAELSGSRLAAQQQMEGLLAPHRPKEPAWFLATVGVSPDHQGKGLGSAVVLPGVEAAERAGVPAFLETSAPRNLPFYERLGFTVTADVEVPEGPRTWCMTRKPGA

SEQ ID NO: 2967 - protein, 955 aa, Artificial Sequence
  Synthetic Polypeptide
MALPVTALLLPLALLLHAARPDIVLTQSPATLSLSPGDRATISCRASESVTILGSHLIYWYQQKPGQPPRLLIQLASNVQTGVPARFSGSGSRTDFTLTISSVEPEDFAVYYCLQSRTIPRTFGQGTKLEIKRGGGGSGGGGSGGGGSQVQLVQSGPEVKKPGESVKISCKASGYTFRHYSMNWVKQAPGQGLKWMGRINTESGVPIYADDFKGRFSFTVDTSASTAYLEISSLTSEDTAVYFCSNDYLYSLDFWGQGTTLTVSSTREQKLISEEDLAKPTTTPAPRPPTPAPTIASQPLSLRPEACRPAAGGAVHTRGLDFACDIYIWAPLAGTCGVLLLSLVITLYCKRGRKKLLYIFKQPFMRPVQTTQEEDGCSCRFPEEEEGGCELRVKFSRSADAPAYQQGQNQLYNELNLGRREEYDVLDKRRGRDPEMGGKPRRKNPQEGLYNELQKDKMAEAYSEIGMKGERRRGKGHDGLYQGLSTATKDTYDALHMQALPPRSRGSGATNFSLLKQAGDVEENPGPGIHMATYEVLCEVARKLGTDDREVVLFLLNVFIPQPTLAQLIGALRALKEEGRLTFPLLAECLFRAGRRDLLRDLLHLDPRFLERHLAGTMSYFSPYQLTVLHVDGELCARDIRSLIFLSKDTIGSRSTPQTFLHWVYCMENLDLLGPTDVDALMSMLRSLSRVDLQRQVQTLMGLHLSGPSHSQHYRHTPLETDFYDYKDDDDKTSGSGEGRGSLLTCGDVEENPGPHMTEYKPTVRLATRDDVPRAVRTLAAAFADYPATRHTVDPDRHIERVTELQELFLTRVGLDIGKVWVADDGAAVAVWTTPESVEAGAVFAEIGPRMAELSGSRLAAQQQMEGLLAPHRPKEPAWFLATVGVSPDHQGKGLGSAVVLPGVEAAERAGVPAFLETSAPRNLPFYERLGFTVTADVEVPEGPRTWCMTRKPGA

SEQ ID NO: 2968 - protein, 956 aa, Artificial Sequence
  Synthetic Polypeptide
MALPVTALLLPLALLLHAARPQSVLTQPPSVSGAPGQRVTISCTGSSSNIGAGFDVHWYQQLPGTAPKLLIYGNSNRPSGVPDRFSGSKSGTSASLAITGLQAEDEADYYCQSYDSSLSGYVFGTGTKVTVLGGGGGSGGGGSGGGGSQVQLVQSGAEVKKPGASVKVSCKASGYTFTDYYMHWVRQAPGQRLEWMGWINPNSGGTNYAQKFQDRITVTRDTSSNTGYMELTRLRSDDTAVYYCARSPYSGVLDKWGQGTLVTVSSTREQKLISEEDLAKPTTTPAPRPPTPAPTIASQPLSLRPEACRPAAGGAVHTRGLDFACDIYIWAPLAGTCGVLLLSLVITLYCKRGRKKLLYIFKQPFMRPVQTTQEEDGCSCRFPEEEEGGCELRVKFSRSADAPAYQQGQNQLYNELNLGRREEYDVLDKRRGRDPEMGGKPRRKNPQEGLYNELQKDKMAEAYSEIGMKGERRRGKGHDGLYQGLSTATKDTYDALHMQALPPRSRGSGATNFSLLKQAGDVEENPGPGIHMATYEVLCEVARKLGTDDREVVLFLLNVFIPQPTLAQLIGALRALKEEGRLTFPLLAECLFRAGRRDLLRDLLHLDPRFLERHLAGTMSYFSPYQLTVLHVDGELCARDIRSLIFLSKDTIGSRSTPQTFLHWVYCMENLDLLGPTDVDALMSMLRSLSRVDLQRQVQTLMGLHLSGPSHSQHYRHTPLETDFYDYKDDDDKTSGSGEGRGSLLTCGDVEENPGPHMTEYKPTVRLATRDDVPRAVRTLAAAFADYPATRHTVDPDRHIERVTELQELFLTRVGLDIGKVWVADDGAAVAVWTTPESVEAGAVFAEIGPRMAELSGSRLAAQQQMEGLLAPHRPKEPAWFLATVGVSPDHQGKGLGSAVVLPGVEAAERAGVPAFLETSAPRNLPFYERLGFTVTADVEVPEGPRTWCMTRKPGA

SEQ ID NO: 2969 - protein, 954 aa, Artificial Sequence
  Synthetic Polypeptide
MALPVTALLLPLALLLHAARPQAVLTQPPSASGTPGQRVTISCSGSSSNIGSYTVSWYQQLPGTAPKFLIYSNNQRPSGVPDRFSGSKSGTSASLAISGLQSEDEADYYCAAWDDSLNGYVFGTGTKVTVLGGGGGSGGGGSGGGGSEVQLVQSGAEVKKPGESLKISCKGSGYDFTTYWIGWVRQMPGKGLEWMGIIYPGDSDTRYSPSVRGRVTISADKSINTAYLQWSSLEASDTAMYYCARMWTFSQDGWGQGTLVTVSSTREQKLISEEDLAKPTTTPAPRPPTPAPTIASQPLSLRPEACRPAAGGAVHTRGLDFACDIYIWAPLAGTCGVLLLSLVITLYCKRGRKKLLYIFKQPFMRPVQTTQEEDGCSCRFPEEEEGGCELRVKFSRSADAPAYQQGQNQLYNELNLGRREEYDVLDKRRGRDPEMGGKPRRKNPQEGLYNELQKDKMAEAYSEIGMKGERRRGKGHDGLYQGLSTATKDTYDALHMQALPPRSRGSGATNFSLLKQAGDVEENPGPGIHMATYEVLCEVARKLGTDDREVVLFLLNVFIPQPTLAQLIGALRALKEEGRLTFPLLAECLFRAGRRDLLRDLLHLDPRFLERHLAGTMSYFSPYQLTVLHVDGELCARDIRSLIFLSKDTIGSRSTPQTFLHWVYCMENLDLLGPTDVDALMSMLRSLSRVDLQRQVQTLMGLHLSGPSHSQHYRHTPLETDFYDYKDDDDKTSGSGEGRGSLLTCGDVEENPGPHMTEYKPTVRLATRDDVPRAVRTLAAAFADYPATRHTVDPDRHIERVTELQELFLTRVGLDIGKVWVADDGAAVAVWTTPESVEAGAVFAEIGPRMAELSGSRLAAQQQMEGLLAPHRPKEPAWFLATVGVSPDHQGKGLGSAVVLPGVEAAERAGVPAFLETSAPRNLPFYERLGFTVTADVEVPEGPRTWCMTRKPGA

SEQ ID NO: 2970 - protein, 965 aa, Artificial Sequence
  Synthetic Polypeptide
MALPVTALLLPLALLLHAARPLPVLTQPPSASGTPGQRVTISCSGRSSNIGSNSVNWYRQLPGAAPKLLIYSNNQRPPGVPVRFSGSKSGTSASLAISGLQSEDEATYYCATWDDNLNVHYVFGTGTKVTVLGSRGGGGSGGGGSGGGGSLEMAQVQLVQSGAEVKKPGSSVKVSCKASGGTFSSYAISWVRQAPGQGLEWMGRIIPILGIANYAQKFQGRVTITADKSTSTAYMELSSLRSEDTAVYYCARGGYYSHDMWSEDWGQGTLVTVSSTREQKLISEEDLAKPTTTPAPRPPTPAPTIASQPLSLRPEACRPAAGGAVHTRGLDFACDIYIWAPLAGTCGVLLLSLVITLYCKRGRKKLLYIFKQPFMRPVQTTQEEDGCSCRFPEEEEGGCELRVKFSRSADAPAYQQGQNQLYNELNLGRREEYDVLDKRRGRDPEMGGKPRRKNPQEGLYNELQKDKMAEAYSEIGMKGERRRGKGHDGLYQGLSTATKDTYDALHMQALPPRSRGSGATNFSLLKQAGDVEENPGPGIHMATYEVLCEVARKLGTDDREVVLFLLNVFIPQPTLAQLIGALRALKEEGRLTFPLLAECLFRAGRRDLLRDLLHLDPRFLERHLAGTMSYFSPYQLTVLHVDGELCARDIRSLIFLSKDTIGSRSTPQTFLHWVYCMENLDLLGPTDVDALMSMLRSLSRVDLQRQVQTLMGLHLSGPSHSQHYRHTPLETDFYDYKDDDDKTSGSGEGRGSLLTCGDVEENPGPHMTEYKPTVRLATRDDVPRAVRTLAAAFADYPATRHTVDPDRHIERVTELQELFLTRVGLDIGKVWVADDGAAVAVWTTPESVEAGAVFAEIGPRMAELSGSRLAAQQQMEGLLAPHRPKEPAWFLATVGVSPDHQGKGLGSAVVLPGVEAAERAGVPAFLETSAPRNLPFYERLGFTVTADVEVPEGPRTWCMTRKPGA

SEQ ID NO: 2971 - protein, 954 aa, Artificial Sequence
  Synthetic Polypeptide
MALPVTALLLPLALLLHAARPDIVLTQSPASLAVSLGERATINCRASESVSVIGAHLIHWYQQKPGQPPKLLIYLASNLETGVPARFSGSGSGTDFTLTISSLQAEDAAIYYCLQSRIFPRTFGQGTKLEIKGGGGSGGGGSGGGGSQVQLVQSGSELKKPGESVKISCKASGYTFTDYSINWVKQAPGQGLKWMGWINTETREPAYAYDFRGRFVFSLDTSASTAYLQISSLKAEDTAVYFCALDYSYAMDYWGQGTLVTVSSTREQKLISEEDLAKPTTTPAPRPPTPAPTIASQPLSLRPEACRPAAGGAVHTRGLDFACDIYIWAPLAGTCGVLLLSLVITLYCKRGRKKLLYIFKQPFMRPVQTTQEEDGCSCRFPEEEEGGCELRVKFSRSADAPAYQQGQNQLYNELNLGRREEYDVLDKRRGRDPEMGGKPRRKNPQEGLYNELQKDKMAEAYSEIGMKGERRRGKGHDGLYQGLSTATKDTYDALHMQALPPRSRGSGATNFSLLKQAGDVEENPGPGIHMATYEVLCEVARKLGTDDREVVLFLLNVFIPQPTLAQLIGALRALKEEGRLTFPLLAECLFRAGRRDLLRDLLHLDPRFLERHLAGTMSYFSPYQLTVLHVDGELCARDIRSLIFLSKDTIGSRSTPQTFLHWVYCMENLDLLGPTDVDALMSMLRSLSRVDLQRQVQTLMGLHLSGPSHSQHYRHTPLETDFYDYKDDDDKTSGSGEGRGSLLTCGDVEENPGPHMTEYKPTVRLATRDDVPRAVRTLAAAFADYPATRHTVDPDRHIERVTELQELFLTRVGLDIGKVWVADDGAAVAVWTTPESVEAGAVFAEIGPRMAELSGSRLAAQQQMEGLLAPHRPKEPAWFLATVGVSPDHQGKGLGSAVVLPGVEAAERAGVPAFLETSAPRNLPFYERLGFTVTADVEVPEGPRTWCMTRKPGA

SEQ ID NO: 2972 - protein, 955 aa, Artificial Sequence
  Synthetic Polypeptide
MALPVTALLLPLALLLHAARPDIVLTQSPATLSLSPGDRATLSCRASESVTILGSHLIYWYQQKPGQAPRLLIQLASNVQTGIPARFSGSGSRTDFTLTISSLEPEDFAVYYCLQSRTIPRTFGQGTKLEIKRGGGGSGGGGSGGGGSQVQLVQSGSELKKPGESVKISCKASGYTFTHYSMNWVRQAPGQGLEWMGRINTETGEPLYADDFKGRFVFSLDTSASTAYLQISSLKAEDTAVYYCSNDYLYSLDYWGQGTLVTVSSTREQKLISEEDLAKPTTTPAPRPPTPAPTIASQPLSLRPEACRPAAGGAVHTRGLDFACDIYIWAPLAGTCGVLLLSLVITLYCKRGRKKLLYIFKQPFMRPVQTTQEEDGCSCRFPEEEEGGCELRVKFSRSADAPAYQQGQNQLYNELNLGRREEYDVLDKRRGRDPEMGGKPRRKNPQEGLYNELQKDKMAEAYSEIGMKGERRRGKGHDGLYQGLSTATKDTYDALHMQALPPRSRGSGATNFSLLKQAGDVEENPGPGIHMATYEVLCEVARKLGTDDREVVLFLLNVFIPQPTLAQLIGALRALKEEGRLTFPLLAECLFRAGRRDLLRDLLHLDPRFLERHLAGTMSYFSPYQLTVLHVDGELCARDIRSLIFLSKDTIGSRSTPQTFLHWVYCMENLDLLGPTDVDALMSMLRSLSRVDLQRQVQTLMGLHLSGPSHSQHYRHTPLETDFYDYKDDDDKTSGSGEGRGSLLTCGDVEENPGPHMTEYKPTVRLATRDDVPRAVRTLAAAFADYPATRHTVDPDRHIERVTELQELFLTRVGLDIGKVWVADDGAAVAVWTTPESVEAGAVFAEIGPRMAELSGSRLAAQQQMEGLLAPHRPKEPAWFLATVGVSPDHQGKGLGSAVVLPGVEAAERAGVPAFLETSAPRNLPFYERLGFTVTADVEVPEGPRTWCMTRKPGA

SEQ ID NO: 2973 - protein, 956 aa, Artificial Sequence
  Synthetic Polypeptide
MALPVTALLLPLALLLHAARPDIVMTQSPDSLAVSLGERATINCKSSQSILYSSNQKNYLAWYQQKPGQSPKLLIYWASTRESGVPDRFSGSGSGTDFTLTISSLQAEDVAVYYCHQYISSYTFGQGTKLEIKGGGGSGGGGSGGGGSQVQLVQSGAEVKKPGASVKVSCKASGYTFASQWMHWMRQAPGQGLEWIGWINPGNVNTKYNEKFKGRATLTVDTSTNTAYMELSSLRSEDTAVYYCARSTWYRPLDYWGQGTLVTVSSTREQKLISEEDLAKPTTTPAPRPPTPAPTIASQPLSLRPEACRPAAGGAVHTRGLDFACDIYIWAPLAGTCGVLLLSLVITLYCKRGRKKLLYIFKQPFMRPVQTTQEEDGCSCRFPEEEEGGCELRVKFSRSADAPAYQQGQNQLYNELNLGRREEYDVLDKRRGRDPEMGGKPRRKNPQEGLYNELQKDKMAEAYSEIGMKGERRRGKGHDGLYQGLSTATKDTYDALHMQALPPRSRGSGATNFSLLKQAGDVEENPGPGIHMATYEVLCEVARKLGTDDREVVLFLLNVFIPQPTLAQLIGALRALKEEGRLTFPLLAECLFRAGRRDLLRDLLHLDPRFLERHLAGTMSYFSPYQLTVLHVDGELCARDIRSLIFLSKDTIGSRSTPQTFLHWVYCMENLDLLGPTDVDALMSMLRSLSRVDLQRQVQTLMGLHLSGPSHSQHYRHTPLETDFYDYKDDDDKTSGSGEGRGSLLTCGDVEENPGPHMTEYKPTVRLATRDDVPRAVRTLAAAFADYPATRHTVDPDRHIERVTELQELFLTRVGLDIGKVWVADDGAAVAVWTTPESVEAGAVFAEIGPRMAELSGSRLAAQQQMEGLLAPHRPKEPAWFLATVGVSPDHQGKGLGSAVVLPGVEAAERAGVPAFLETSAPRNLPFYERLGFTVTADVEVPEGPRTWCMTRKPGA

SEQ ID NO: 2974 - protein, 1080 aa, Artificial Sequence
  Synthetic Polypeptide
MVRGVPFRHLLLVLQLALLPAATQGKKVVLGKKGDTVELTCTASQKKSIQFHWKNSNQIKILGNQGSFLTKGPSKLNDRADSRRSLWDQGNFPLIIKNLKIEDSDTYICEVEDQKEEVQLLVFGLTANSDTHLLQGQSLTLTLESPPGSSPSVQCRSPRGKNIQGGKTLSVSQLELQDSGTWTCTVLQNQKKVEFKIDIVVLAFQKASGGGGSGGGGSGGGGSIYQELTQLKAAVERLCHPCPWEWTFFQGNCYFMSNSQRNWHDSITACKEVGAQLVVIKSAEEQNFLQLQSSRSNRFTWMGLSDLNQEGTWQWVDGSPLLPSFKQYWNRGEPNNVGEEDCAEFSGNGWNDDKCNLAKFWICKKSAASCSRDEEQFLSPAPATPNPPPATREQKLISEEDLAKPTTTPAPRPPTPAPTIASQPLSLRPEACRPAAGGAVHTRGLDFACDIYIWAPLAGTCGVLLLSLVITLYCKRGRKKLLYIFKQPFMRPVQTTQEEDGCSCRFPEEEEGGCELRVKFSRSADAPAYQQGQNQLYNELNLGRREEYDVLDKRRGRDPEMGGKPRRKNPQEGLYNELQKDKMAEAYSEIGMKGERRRGKGHDGLYQGLSTATKDTYDALHMQALPPRSRGSGATNFSLLKQAGDVEENPGPGIHMATYEVLCEVARKLGTDDREVVLFLLNVFIPQPTLAQLIGALRALKEEGRLTFPLLAECLFRAGRRDLLRDLLHLDPRFLERHLAGTMSYFSPYQLTVLHVDGELCARDIRSLIFLSKDTIGSRSTPQTFLHWVYCMENLDLLGPTDVDALMSMLRSLSRVDLQRQVQTLMGLHLSGPSHSQHYRHTPLETDFYDYKDDDDKTSGSGEGRGSLLTCGDVEENPGPHMTEYKPTVRLATRDDVPRAVRTLAAAFADYPATRHTVDPDRHIERVTELQELFLTRVGLDIGKVWVADDGAAVAVWTTPESVEAGAVFAEIGPRMAELSGSRLAAQQQMEGLLAPHRPKEPAWFLATVGVSPDHQGKGLGSAVVLPGVEAAERAGVPAFLETSAPRNLPFYERLGFTVTADVEVPEGPRTWCMTRKPGA

SEQ ID NO: 2975 - protein, 956 aa, Artificial Sequence
  Synthetic Polypeptide
MALPVTALLLPLALLLHAARPDHIVLTQSPSSLSASLGDRVTISCRASQDISTYLNWYQQKPDGTVKLLIFYTSRLHAGVPSRFSGSGSGTHHSLTISNLEQEDIATYFCQQGNSLPFTFGSGTKLEIKRGGGGSGGGGSGGGGSQVQLKESGPELEKPGASVKISCKASGYSFTAYSMNWVKQNNGMSLEWIGSIDPYYGDTKYAQKFKGKATLTVDKASSTAYLQLKSLTSEDSAVYYCARRMITTGDWYFDVWGAGTTVTVSSTREQKLISEEDLAKPTTTPAPRPPTPAPTIASQPLSLRPEACRPAAGGAVHTRGLDFACDIYIWAPLAGTCGVLLLSLVITLYCKRGRKKLLYIFKQPFMRPVQTTQEEDGCSCRFPEEEEGGCELRVKFSRSADAPAYQQGQNQLYNELNLGRREEYDVLDKRRGRDPEMGGKPRRKNPQEGLYNELQKDKMAEAYSEIGMKGERRRGKGHDGLYQGLSTATKDTYDALHMQALPPRSRGSGATNFSLLKQAGDVEENPGPGIHMATYEVLCEVARKLGTDDREVVLFLLNVFIPQPTLAQLIGALRALKEEGRLTFPLLAECLFRAGRRDLLRDLLHLDPRFLERHLAGTMSYFSPYQLTVLHVDGELCARDIRSLIFLSKDTIGSRSTPQTFLHWVYCMENLDLLGPTDVDALMSMLRSLSRVDLQRQVQTLMGLHLSGPSHSQHYRHTPLETDFYDYKDDDDKTSGSGEGRGSLLTCGDVEENPGPHMTEYKPTVRLATRDDVPRAVRTLAAAFADYPATRHTVDPDRHIERVTELQELFLTRVGLDIGKVWVADDGAAVAVWTTPESVEAGAVFAEIGPRMAELSGSRLAAQQQMEGLLAPHRPKEPAWFLATVGVSPDHQGKGLGSAVVLPGVEAAERAGVPAFLETSAPRNLPFYERLGFTVTADVEVPEGPRTWCMTRKPGA

SEQ ID NO: 2976 - protein, 956 aa, Artificial Sequence; identical to SEQ ID NO: 2975
  Synthetic Polypeptide

SEQ ID NO: 2977 - protein, 903 aa, Artificial Sequence
  Synthetic Polypeptide
MALPVTALLLPLALLLHAARPGMRTEDLPKAVVFLEPQWYRVLEKDSVTLKCQGAYSPEDNSTQWFHNESLISSQASSYFIDAATVDDSGEYRCQTNLSTLSDPVQLEVHIGWLLLQAPRWVFKEEDPIHLRCHSWKNTALHKVTYLQNGKGRKYFHHNSDFYIPKATLKDSGSYFCRGLVGSKNVSSETVNITITQGLAVSTISSFFPPGYQTREQKLISEEDLAKPTTTPAPRPPTPAPTIASQPLSLRPEACRPAAGGAVHTRGLDFACDIYIWAPLAGTCGVLLLSLVITLYCKRGRKKLLYIFKQPFMRPVQTTQEEDGCSCRFPEEEEGGCELRVKFSRSADAPAYQQGQNQLYNELNLGRREEYDVLDKRRGRDPEMGGKPRRKNPQEGLYNELQKDKMAEAYSEIGMKGERRRGKGHDGLYQGLSTATKDTYDALHMQALPPRSRGSGATNFSLLKQAGDVEENPGPGIHMATYEVLCEVARKLGTDDREVVLFLLNVFIPQPTLAQLIGALRALKEEGRLTFPLLAECLFRAGRRDLLRDLLHLDPRFLERHLAGTMSYFSPYQLTVLHVDGELCARDIRSLIFLSKDTIGSRSTPQTFLHWVYCMENLDLLGPTDVDALMSMLRSLSRVDLQRQVQTLMGLHLSGPSHSQHYRHTPLETDFYDYKDDDDKTSGSGEGRGSLLTCGDVEENPGPHMTEYKPTVRLATRDDVPRAVRTLAAAFADYPATRHTVDPDRHIERVTELQELFLTRVGLDIGKVWVADDGAAVAVWTTPESVEAGAVFAEIGPRMAELSGSRLAAQQQMEGLLAPHRPKEPAWFLATVGVSPDHQGKGLGSAVVLPGVEAAERAGVPAFLETSAPRNLPFYERLGFTVTADVEVPEGPRTWCMTRKPGA

SEQ ID NO: 2978 - protein, 903 aa, Artificial Sequence; identical to SEQ ID NO: 2977
  Synthetic Polypeptide

SEQ ID NO: 2979 - protein, 956 aa, Artificial Sequence
  Synthetic Polypeptide
MALPVTALLLPLALLLHAARPDEIVLTQSPATLSLSPGERATLSCRASQSVSSYLAWYQQKPGQAPRLLIYDASNRATGIPARFSGSGSGTDFTLTISSLEPEDFAVYYCQQRSNWPITFGQGTRLEIKGGGGSGGGGSGGGGSEVQLVESGGGLVQPGRSLRLSCAASGFTFNDYAMHWVRQAPGKGLEWVSTISWNSGSIGYADSVKGRFTISRDNAKKSLYLQMNSLRAEDTALYYCAKDIQYGNYYYGMDVWGQGTTVTVSSTREQKLISEEDLAKPTTTPAPRPPTPAPTIASQPLSLRPEACRPAAGGAVHTRGLDFACDIYIWAPLAGTCGVLLLSLVITLYCKRGRKKLLYIFKQPFMRPVQTTQEEDGCSCRFPEEEEGGCELRVKFSRSADAPAYQQGQNQLYNELNLGRREEYDVLDKRRGRDPEMGGKPRRKNPQEGLYNELQKDKMAEAYSEIGMKGERRRGKGHDGLYQGLSTATKDTYDALHMQALPPRSRGSGATNFSLLKQAGDVEENPGPGIHMATYEVLCEVARKLGTDDREVVLFLLNVFIPQPTLAQLIGALRALKEEGRLTFPLLAECLFRAGRRDLLRDLLHLDPRFLERHLAGTMSYFSPYQLTVLHVDGELCARDIRSLIFLSKDTIGSRSTPQTFLHWVYCMENLDLLGPTDVDALMSMLRSLSRVDLQRQVQTLMGLHLSGPSHSQHYRHTPLETDFYDYKDDDDKTSGSGEGRGSLLTCGDVEENPGPHMTEYKPTVRLATRDDVPRAVRTLAAAFADYPATRHTVDPDRHIERVTELQELFLTRVGLDIGKVWVADDGAAVAVWTTPESVEAGAVFAEIGPRMAELSGSRLAAQQQMEGLLAPHRPKEPAWFLATVGVSPDHQGKGLGSAVVLPGVEAAERAGVPAFLETSAPRNLPFYERLGFTVTADVEVPEGPRTWCMTRKPGA

SEQ ID NO: 2980 - protein, 958 aa, Artificial Sequence
  Synthetic Polypeptide
MALPVTALLLPLALLLHAARPDIVMTQTPLSLPVTPGEPASISCRSSKSLLHSNGITYLYWYLQKPGQSPQLLIYQMSNLVSGVPDRFSGSGSGTDFTLKISRVEAEDVGVYYCAQNLELPYTFGGGTKVEIKRGGGGSGGGGSGGGGSQVQLVQSGAEVKKPGSSVKVSCKASGYAFSYSWINWVRQAPGQGLEWMGRIFPGDGDTDYNGKFKGRVTITADKSTSTAYMELSSLRSEDTAVYYCARNVFDGYWLVYWGQGTLVTVSSTREQKLISEEDLAKPTTTPAPRPPTPAPTIASQPLSLRPEACRPAAGGAVHTRGLDFACDIYIWAPLAGTCGVLLLSLVITLYCKRGRKKLLYIFKQPFMRPVQTTQEEDGCSCRFPEEEEGGCELRVKFSRSADAPAYQQGQNQLYNELNLGRREEYDVLDKRRGRDPEMGGKPRRKNPQEGLYNELQKDKMAEAYSEIGMKGERRRGKGHDGLYQGLSTATKDTYDALHMQALPPRSRGSGATNFSLLKQAGDVEENPGPGIHMATYEVLCEVARKLGTDDREVVLFLLNVFIPQPTLAQLIGALRALKEEGRLTFPLLAECLFRAGRRDLLRDLLHLDPRFLERHLAGTMSYFSPYQLTVLHVDGELCARDIRSLIFLSKDTIGSRSTPQTFLHWVYCMENLDLLGPTDVDALMSMLRSLSRVDLQRQVQTLMGLHLSGPSHSQHYRHTPLETDFYDYKDDDDKTSGSGEGRGSLLTCGDVEENPGPHMTEYKPTVRLATRDDVPRAVRTLAAAFADYPATRHTVDPDRHIERVTELQELFLTRVGLDIGKVWVADDGAAVAVWTTPESVEAGAVFAEIGPRMAELSGSRLAAQQQMEGLLAPHRPKEPAWFLATVGVSPDHQGKGLGSAVVLPGVEAAERAGVPAFLETSAPRNLPFYERLGFTVTADVEVPEGPRTWCMTRKPGA

SEQ ID NO: 2981 - protein, 955 aa, Artificial Sequence
  Synthetic Polypeptide
MALPVTALLLPLALLLHAARPDIVLTQSPAIITASPGEKVTMTCRASSSVNYMDWYQKKPGSSPKPWIYATSNLASGVPSRFSGSGSGTTYSMTISSLEAEDAATYYCQQWSFNPPTFGGGTKLEIKRGGGGSGGGGSGGGGSEVQLQQSGAELKKPGASVKVSCKASGYTFTSYNMHWVKQTPGQGLEWIGAIYPGNGDTSYNQKFKGKTTLTADKSSSTAYMELSSLRSEDTAVYYCARSNYYGSSYWFFDVWGTGTTVTVSSTREQKLISEEDLAKPTTTPAPRPPTPAPTIASQPLSLRPEACRPAAGGAVHTRGLDFACDIYIWAPLAGTCGVLLLSLVITLYCKRGRKKLLYIFKQPFMRPVQTTQEEDGCSCRFPEEEEGGCELRVKFSRSADAPAYQQGQNQLYNELNLGRREEYDVLDKRRGRDPEMGGKPRRKNPQEGLYNELQKDKMAEAYSEIGMKGERRRGKGHDGLYQGLSTATKDTYDALHMQALPPRSRGSGATNFSLLKQAGDVEENPGPGIHMATYEVLCEVARKLGTDDREVVLFLLNVFIPQPTLAQLIGALRALKEEGRLTFPLLAECLFRAGRRDLLRDLLHLDPRFLERHLAGTMSYFSPYQLTVLHVDGELCARDIRSLIFLSKDTIGSRSTPQTFLHWVYCMENLDLLGPTDVDALMSMLRSLSRVDLQRQVQTLMGLHLSGPSHSQHYRHTPLETDFYDYKDDDDKTSGSGEGRGSLLTCGDVEENPGPHMTEYKPTVRLATRDDVPRAVRTLAAAFADYPATRHTVDPDRHIERVTELQELFLTRVGLDIGKVWVADDGAAVAVWTTPESVEAGAVFAEIGPRMAELSGSRLAAQQQMEGLLAPHRPKEPAWFLATVGVSPDHQGKGLGSAVVLPGVEAAERAGVPAFLETSAPRNLPFYERLGFTVTADVEVPEGPRTWCMTRKPGA

SEQ ID NO: 2982 - protein, 958 aa, Artificial Sequence
  Synthetic Polypeptide
MALPVTALLLPLALLLHAARPEIVLTQSPATLSLSPGERATLSCRASQSVSSYLAWYQQKPGQAPRLLIYDASNRATGIPARFSGSGSGTDFTLTISSLEPEDFAVYYCQQRSDWPLTFGGGTKVEIKGGGGSGGGGSGGGGSEVQLVQSGGGLVHPGGSLRLSCTGSGFTFSYHAMHWVRQAPGKGLEWVSIIGTGGVTYYADSVKGRFTISRDNVKNSLYLQMNSLRAEDMAVYYCARDYYGAGSFYDGLYGMDVWGQGTTVTVSSTREQKLISEEDLAKPTTTPAPRPPTPAPTIASQPLSLRPEACRPAAGGAVHTRGLDFACDIYIWAPLAGTCGVLLLSLVITLYCKRGRKKLLYIFKQPFMRPVQTTQEEDGCSCRFPEEEEGGCELRVKFSRSADAPAYQQGQNQLYNELNLGRREEYDVLDKRRGRDPEMGGKPRRKNPQEGLYNELQKDKMAEAYSEIGMKGERRRGKGHDGLYQGLSTATKDTYDALHMQALPPRSRGSGATNFSLLKQAGDVEENPGPGIHMATYEVLCEVARKLGTDDREVVLFLLNVFIPQPTLAQLIGALRALKEEGRLTFPLLAECLFRAGRRDLLRDLLHLDPRFLERHLAGTMSYFSPYQLTVLHVDGELCARDIRSLIFLSKDTIGSRSTPQTFLHWVYCMENLDLLGPTDVDALMSMLRSLSRVDLQRQVQTLMGLHLSGPSHSQHYRHTPLETDFYDYKDDDDKTSGSGEGRGSLLTCGDVEENPGPHMTEYKPTVRLATRDDVPRAVRTLAAAFADYPATRHTVDPDRHIERVTELQELFLTRVGLDIGKVWVADDGAAVAVWTTPESVEAGAVFAEIGPRMAELSGSRLAAQQQMEGLLAPHRPKEPAWFLATVGVSPDHQGKGLGSAVVLPGVEAAERAGVPAFLETSAPRNLPFYERLGFTVTADVEVPEGPRTWCMTRKPGA

SEQ ID NO: 2983 - protein, 956 aa, Artificial Sequence
  Synthetic Polypeptide
MALPVTALLLPLALLLHAARPEIVLTQSPATLSLSPGERATLSCRASQSVSSYLAWYQQKPGQAPRLLIYDASNRATGIPARFSGSGSGTDFTLTISSLEPEDFAVYYCQQRSNWPLTFGGGTKVEIKGGGGSGGGGSGGGGSAVQLVESGGGLVQPGRSLRLSCAASGFTFGDYTMHWVRQAPGKGLEWVSGISWNSGSIGYADSVKGRFTISRDNAKNSLYLQMNSLRAEDTALYYCTKDNQYGSGSTYGLGVWGQGTLVTVSSTREQKLISEEDLAKPTTTPAPRPPTPAPTIASQPLSLRPEACRPAAGGAVHTRGLDFACDIYIWAPLAGTCGVLLLSLVITLYCKRGRKKLLYIFKQPFMRPVQTTQEEDGCSCRFPEEEEGGCELRVKFSRSADAPAYQQGQNQLYNELNLGRREEYDVLDKRRGRDPEMGGKPRRKNPQEGLYNELQKDKMAEAYSEIGMKGERRRGKGHDGLYQGLSTATKDTYDALHMQALPPRSRGSGATNFSLLKQAGDVEENPGPGIHMATYEVLCEVARKLGTDDREVVLFLLNVFIPQPTLAQLIGALRALKEEGRLTFPLLAECLFRAGRRDLLRDLLHLDPRFLERHLAGTMSYFSPYQLTVLHVDGELCARDIRSLIFLSKDTIGSRSTPQTFLHWVYCMENLDLLGPTDVDALMSMLRSLSRVDLQRQVQTLMGLHLSGPSHSQHYRHTPLETDFYDYKDDDDKTSGSGEGRGSLLTCGDVEENPGPHMTEYKPTVRLATRDDVPRAVRTLAAAFADYPATRHTVDPDRHIERVTELQELFLTRVGLDIGKVWVADDGAAVAVWTTPESVEAGAVFAEIGPRMAELSGSRLAAQQQMEGLLAPHRPKEPAWFLATVGVSPDHQGKGLGSAVVLPGVEAAERAGVPAFLETSAPRNLPFYERLGFTVTADVEVPEGPRTWCMTRKPGA

SEQ ID NO: 2984 - protein, 955 aa, Artificial Sequence
  Synthetic Polypeptide
MALPVTALLLPLALLLHAARPDIQMTQSPSSLSASVGDRVTITCRASSSVSYMHWYQQKPGKAPKPLIYAPSNLASGVPSRFSGSGSGTDFTLTISSLQPEDFATYYCQQWSFNPPTFGQGTKVEIKRGGGGSGGGGSGGGGSEVQLVESGGGLVQPGGSLRLSCAASGYTFTSYNMHWVRQAPGKGLEWVGAIYPGNGDTSYNQKFKGRFTISVDKSKNTLYLQMNSLRAEDTAVYYCARVVYYSNSYWYFDVWGQGTLVTVSSTREQKLISEEDLAKPTTTPAPRPPTPAPTIASQPLSLRPEACRPAAGGAVHTRGLDFACDIYIWAPLAGTCGVLLLSLVITLYCKRGRKKLLYIFKQPFMRPVQTTQEEDGCSCRFPEEEEGGCELRVKFSRSADAPAYQQGQNQLYNELNLGRREEYDVLDKRRGRDPEMGGKPRRKNPQEGLYNELQKDKMAEAYSEIGMKGERRRGKGHDGLYQGLSTATKDTYDALHMQALPPRSRGSGATNFSLLKQAGDVEENPGPGIHMATYEVLCEVARKLGTDDREVVLFLLNVFIPQPTLAQLIGALRALKEEGRLTFPLLAECLFRAGRRDLLRDLLHLDPRFLERHLAGTMSYFSPYQLTVLHVDGELCARDIRSLIFLSKDTIGSRSTPQTFLHWVYCMENLDLLGPTDVDALMSMLRSLSRVDLQRQVQTLMGLHLSGPSHSQHYRHTPLETDFYDYKDDDDKTSGSGEGRGSLLTCGDVEENPGPHMTEYKPTVRLATRDDVPRAVRTLAAAFADYPATRHTVDPDRHIERVTELQELFLTRVGLDIGKVWVADDGAAVAVWTTPESVEAGAVFAEIGPRMAELSGSRLAAQQQMEGLLAPHRPKEPAWFLATVGVSPDHQGKGLGSAVVLPGVEAAERAGVPAFLETSAPRNLPFYERLGFTVTADVEVPEGPRTWCMTRKPGA

SEQ ID NO: 2985 - protein, 953 aa, Artificial Sequence
  Synthetic Polypeptide
MALPVTALLLPLALLLHAARPDIQLTQSPSSLSASVGDRVTMTCRASSSVSYIHWFQQKPGKAPKPWIYATSNLASGVPVRFSGSGSGTDYTFTISSLQPEDIATYYCQQWTSNPPTFGGGTKLEIKGGGGSGGGGSGGGGSQVQLQQSGAEVKKPGSSVKVSCKASGYTFTSYNMHWVKQAPGQGLEWIGAIYPGNGDTSYNQKFKGKATLTADESTNTAYMELSSLRSEDTAFYYCARSTYYGGDWYFDVWGQGTTVTVSSTREQKLISEEDLAKPTTTPAPRPPTPAPTIASQPLSLRPEACRPAAGGAVHTRGLDFACDIYIWAPLAGTCGVLLLSLVITLYCKRGRKKLLYIFKQPFMRPVQTTQEEDGCSCRFPEEEEGGCELRVKFSRSADAPAYQQGQNQLYNELNLGRREEYDVLDKRRGRDPEMGGKPRRKNPQEGLYNELQKDKMAEAYSEIGMKGERRRGKGHDGLYQGLSTATKDTYDALHMQALPPRSRGSGATNFSLLKQAGDVEENPGPGIHMATYEVLCEVARKLGTDDREVVLFLLNVFIPQPTLAQLIGALRALKEEGRLTFPLLAECLFRAGRRDLLRDLLHLDPRFLERHLAGTMSYFSPYQLTVLHVDGELCARDIRSLIFLSKDTIGSRSTPQTFLHWVYCMENLDLLGPTDVDALMSMLRSLSRVDLQRQVQTLMGLHLSGPSHSQHYRHTPLETDFYDYKDDDDKTSGSGEGRGSLLTCGDVEENPGPHMTEYKPTVRLATRDDVPRAVRTLAAAFADYPATRHTVDPDRHIERVTELQELFLTRVGLDIGKVWVADDGAAVAVWTTPESVEAGAVFAEIGPRMAELSGSRLAAQQQMEGLLAPHRPKEPAWFLATVGVSPDHQGKGLGSAVVLPGVEAAERAGVPAFLETSAPRNLPFYERLGFTVTADVEVPEGPRTWCMTRKPGA

SEQ ID NO: 2986 - protein, 965 aa, Artificial Sequence
  Synthetic Polypeptide
MALPVTALLLPLALLLHAARPSTVMTQSPDSLAVSLGERATINCKSSQSNSNDVAWYQQKPGQSPKVLIYFASNRYSGVPDRFSGSGYGTDFTLTISSLQAEDVAVYFCQQDYSSPLTFGAGTKLELKRADAGGGGSGGGGSGGGGSQIQLVQSGSELKKPGASVKVSCKASGYTFTNFGVNWVRQAPGKGLEWMGWINTYTGEPSYAQGFTGRFVFSLDASVSTAYLQISSLKAEDTATYFCTRRTNYYGTSYYYAMDYWGQGTTVTVSSAKTTTREQKLISEEDLAKPTTTPAPRPPTPAPTIASQPLSLRPEACRPAAGGAVHTRGLDFACDIYIWAPLAGTCGVLLLSLVITLYCKRGRKKLLYIFKQPFMRPVQTTQEEDGCSCRFPEEEEGGCELRVKFSRSADAPAYQQGQNQLYNELNLGRREEYDVLDKRRGRDPEMGGKPRRKNPQEGLYNELQKDKMAEAYSEIGMKGERRRGKGHDGLYQGLSTATKDTYDALHMQALPPRSRGSGATNFSLLKQAGDVEENPGPGIHMATYEVLCEVARKLGTDDREVVLFLLNVFIPQPTLAQLIGALRALKEEGRLTFPLLAECLFRAGRRDLLRDLLHLDPRFLERHLAGTMSYFSPYQLTVLHVDGELCARDIRSLIFLSKDTIGSRSTPQTFLHWVYCMENLDLLGPTDVDALMSMLRSLSRVDLQRQVQTLMGLHLSGPSHSQHYRHTPLETDFYDYKDDDDKTSGSGEGRGSLLTCGDVEENPGPHMTEYKPTVRLATRDDVPRAVRTLAAAFADYPATRHTVDPDRHIERVTELQELFLTRVGLDIGKVWVADDGAAVAVWTTPESVEAGAVFAEIGPRMAELSGSRLAAQQQMEGLLAPHRPKEPAWFLATVGVSPDHQGKGLGSAVVLPGVEAAERAGVPAFLETSAPRNLPFYERLGFTVTADVEVPEGPRTWCMTRKPGA

SEQ ID NO: 2987 - protein, 957 aa, Artificial Sequence
  Synthetic Polypeptide
MALPVTALLLPLALLLHAARPQIVLSQSPAILSASPGEKVTMTCRASSSVSYMHWYQQKPGSSPKPWIYATSNLASGVPARFSGSGSGTSYSFTISRVEAEDAATYYCQQWTFNPPTFGGGTRLEIKRTVAAGGGGSGGGGSGGGGSQAYLQQSGAELVRPGASVKMSCKASGYTFTSYNMHWVKQTPRQGLEWIGGIYPGNGDTSYNQKFKGKATLTVGKSSSTAYMQLSSLTSEDSAVYFCARYDYNYAMDYWGQGTSVTVSSASTREQKLISEEDLAKPTTTPAPRPPTPAPTIASQPLSLRPEACRPAAGGAVHTRGLDFACDIYIWAPLAGTCGVLLLSLVITLYCKRGRKKLLYIFKQPFMRPVQTTQEEDGCSCRFPEEEEGGCELRVKFSRSADAPAYQQGQNQLYNELNLGRREEYDVLDKRRGRDPEMGGKPRRKNPQEGLYNELQKDKMAEAYSEIGMKGERRRGKGHDGLYQGLSTATKDTYDALHMQALPPRSRGSGATNFSLLKQAGDVEENPGPGIHMATYEVLCEVARKLGTDDREVVLFLLNVFIPQPTLAQLIGALRALKEEGRLTFPLLAECLFRAGRRDLLRDLLHLDPRFLERHLAGTMSYFSPYQLTVLHVDGELCARDIRSLIFLSKDTIGSRSTPQTFLHWVYCMENLDLLGPTDVDALMSMLRSLSRVDLQRQVQTLMGLHLSGPSHSQHYRHTPLETDFYDYKDDDDKTSGSGEGRGSLLTCGDVEENPGPHMTEYKPTVRLATRDDVPRAVRTLAAAFADYPATRHTVDPDRHIERVTELQELFLTRVGLDIGKVWVADDGAAVAVWTTPESVEAGAVFAEIGPRMAELSGSRLAAQQQMEGLLAPHRPKEPAWFLATVGVSPDHQGKGLGSAVVLPGVEAAERAGVPAFLETSAPRNLPFYERLGFTVTADVEVPEGPRTWCMTRKPGA

SEQ ID NO: 2988 - protein, 955 aa, Artificial Sequence; identical to SEQ ID NO: 2984
  Synthetic Polypeptide

SEQ ID NO: 2989 - protein, 954 aa, Artificial Sequence
  Synthetic Polypeptide
MALPVTALLLPLALLLHAARPEIVLTQSPSSLSASVGDRVTITCRASSSLSFMHWYQQKPGKAPKPWIYATSNLASGVPSRFSGSGSGTDYTLTISSLQPEDFATYFCHQWSSNPLTFGGGTKVEIKGGGGSGGGGSGGGGSQVQLVQSGAEVKKPGASVKVSCKASGYTFTSYNMHWVRQAPGQRLEWIGAIYPGNGDTSYNQKFKGRVTVTRDTSANTAYMELSSLKSEDTAVYYCARSHYGSNYVDYFDYWGQGTLVTVSSTREQKLISEEDLAKPTTTPAPRPPTPAPTIASQPLSLRPEACRPAAGGAVHTRGLDFACDIYIWAPLAGTCGVLLLSLVITLYCKRGRKKLLYIFKQPFMRPVQTTQEEDGCSCRFPEEEEGGCELRVKFSRSADAPAYQQGQNQLYNELNLGRREEYDVLDKRRGRDPEMGGKPRRKNPQEGLYNELQKDKMAEAYSEIGMKGERRRGKGHDGLYQGLSTATKDTYDALHMQALPPRSRGSGATNFSLLKQAGDVEENPGPGIHMATYEVLCEVARKLGTDDREVVLFLLNVFIPQPTLAQLIGALRALKEEGRLTFPLLAECLFRAGRRDLLRDLLHLDPRFLERHLAGTMSYFSPYQLTVLHVDGELCARDIRSLIFLSKDTIGSRSTPQTFLHWVYCMENLDLLGPTDVDALMSMLRSLSRVDLQRQVQTLMGLHLSGPSHSQHYRHTPLETDFYDYKDDDDKTSGSGEGRGSLLTCGDVEENPGPHMTEYKPTVRLATRDDVPRAVRTLAAAFADYPATRHTVDPDRHIERVTELQELFLTRVGLDIGKVWVADDGAAVAVWTTPESVEAGAVFAEIGPRMAELSGSRLAAQQQMEGLLAPHRPKEPAWFLATVGVSPDHQGKGLGSAVVLPGVEAAERAGVPAFLETSAPRNLPFYERLGFTVTADVEVPEGPRTWCMTRKPGA

SEQ ID NO: 2990 - protein, 956 aa, Artificial Sequence
  Synthetic Polypeptide
MALPVTALLLPLALLLHAARPDEIVLTQSPATLSLSPGERATLSCRASQSVSSYLAWYQQKPGQAPRLLIYDASNRATGIPARFSGSGSGTDFTLTISSLEPEDFAVYYCQQRSNWPITFGQGTRLEIKGGGGSGGGGSGGGGSEVQLVESGGGLVQPDRSLRLSCAASGFTFHDYAMHWVRQAPGKGLEWVSTISWNSGTIGYADSVKGRFTISRDNAKNSLYLQMNSLRAEDTALYYCAKDIQYGNYYYGMDVWGQGTTVTVSSTREQKLISEEDLAKPTTTPAPRPPTPAPTIASQPLSLRPEACRPAAGGAVHTRGLDFACDIYIWAPLAGTCGVLLLSLVITLYCKRGRKKLLYIFKQPFMRPVQTTQEEDGCSCRFPEEEEGGCELRVKFSRSADAPAYQQGQNQLYNELNLGRREEYDVLDKRRGRDPEMGGKPRRKNPQEGLYNELQKDKMAEAYSEIGMKGERRRGKGHDGLYQGLSTATKDTYDALHMQALPPRSRGSGATNFSLLKQAGDVEENPGPGIHMATYEVLCEVARKLGTDDREVVLFLLNVFIPQPTLAQLIGALRALKEEGRLTFPLLAECLFRAGRRDLLRDLLHLDPRFLERHLAGTMSYFSPYQLTVLHVDGELCARDIRSLIFLSKDTIGSRSTPQTFLHWVYCMENLDLLGPTDVDALMSMLRSLSRVDLQRQVQTLMGLHLSGPSHSQHYRHTPLETDFYDYKDDDDKTSGSGEGRGSLLTCGDVEENPGPHMTEYKPTVRLATRDDVPRAVRTLAAAFADYPATRHTVDPDRHIERVTELQELFLTRVGLDIGKVWVADDGAAVAVWTTPESVEAGAVFAEIGPRMAELSGSRLAAQQQMEGLLAPHRPKEPAWFLATVGVSPDHQGKGLGSAVVLPGVEAAERAGVPAFLETSAPRNLPFYERLGFTVTADVEVPEGPRTWCMTRKPGA

SEQ ID NO: 2991 - protein, 954 aa, Artificial Sequence
  Synthetic Polypeptide
MALPVTALLLPLALLLHAARPEIVLTQSPGTLSLSPGERATLSCRASSSVPYIHWYQQKPGQAPRLLIYATSALASGIPDRFSGSGSGTDFTLTISRLEPEDFAVYYCQQWLSNPPTFGQGTKLELKRGGGGSGGGGSGGGGSEVQLVQSGAEVKKPGESLKLSCKGSGRTFTSYNMHWVRQMPGKGLEWMGAIYPLTGDTSYNQKSKLQVTISADKSISTAYLQWSSLKASDTAMYYCARSTYVGGDWQFDVWGKGTTVTVSSTREQKLISEEDLAKPTTTPAPRPPTPAPTIASQPLSLRPEACRPAAGGAVHTRGLDFACDIYIWAPLAGTCGVLLLSLVITLYCKRGRKKLLYIFKQPFMRPVQTTQEEDGCSCRFPEEEEGGCELRVKFSRSADAPAYQQGQNQLYNELNLGRREEYDVLDKRRGRDPEMGGKPRRKNPQEGLYNELQKDKMAEAYSEIGMKGERRRGKGHDGLYQGLSTATKDTYDALHMQALPPRSRGSGATNFSLLKQAGDVEENPGPGIHMATYEVLCEVARKLGTDDREVVLFLLNVFIPQPTLAQLIGALRALKEEGRLTFPLLAECLFRAGRRDLLRDLLHLDPRFLERHLAGTMSYFSPYQLTVLHVDGELCARDIRSLIFLSKDTIGSRSTPQTFLHWVYCMENLDLLGPTDVDALMSMLRSLSRVDLQRQVQTLMGLHLSGPSHSQHYRHTPLETDFYDYKDDDDKTSGSGEGRGSLLTCGDVEENPGPHMTEYKPTVRLATRDDVPRAVRTLAAAFADYPATRHTVDPDRHIERVTELQELFLTRVGLDIGKVWVADDGAAVAVWTTPESVEAGAVFAEIGPRMAELSGSRLAAQQQMEGLLAPHRPKEPAWFLATVGVSPDHQGKGLGSAVVLPGVEAAERAGVPAFLETSAPRNLPFYERLGFTVTADVEVPEGPRTWCMTRKPGA

SEQ ID NO: 2992 - protein, 959 aa, Artificial Sequence
  Synthetic Polypeptide
MALPVTALLLPLALLLHAARPDIQMTQSPSSLSASVGDRVTITCRSSQSIVHSVGNTFLEWYQQKPGKAPKLLIYKVSNRFSGVPSRFSGSGSGTDFTLTISSLQPEDFATYYCFQGSQFPYTFGQGTKVEIKRGGGGSGGGGSGGGGSEVQLVESGGGLVQPGGSLRLSCAASGYEFSRSWMNWVRQAPGKGLEWVGRIYPGDGDTNYSGKFKGRFTISADTSKNTAYLQMNSLRAEDTAVYYCARDGSSWDWYFDVWGQGTLVTVSSTREQKLISEEDLAKPTTTPAPRPPTPAPTIASQPLSLRPEACRPAAGGAVHTRGLDFACDIYIWAPLAGTCGVLLLSLVITLYCKRGRKKLLYIFKQPFMRPVQTTQEEDGCSCRFPEEEEGGCELRVKFSRSADAPAYQQGQNQLYNELNLGRREEYDVLDKRRGRDPEMGGKPRRKNPQEGLYNELQKDKMAEAYSEIGMKGERRRGKGHDGLYQGLSTATKDTYDALHMQALPPRSRGSGATNFSLLKQAGDVEENPGPGIHMATYEVLCEVARKLGTDDREVVLFLLNVFIPQPTLAQLIGALRALKEEGRLTFPLLAECLFRAGRRDLLRDLLHLDPRFLERHLAGTMSYFSPYQLTVLHVDGELCARDIRSLIFLSKDTIGSRSTPQTFLHWVYCMENLDLLGPTDVDALMSMLRSLSRVDLQRQVQTLMGLHLSGPSHSQHYRHTPLETDFYDYKDDDDKTSGSGEGRGSLLTCGDVEENPGPHMTEYKPTVRLATRDDVPRAVRTLAAAFADYPATRHTVDPDRHIERVTELQELFLTRVGLDIGKVWVADDGAAVAVWTTPESVEAGAVFAEIGPRMAELSGSRLAAQQQMEGLLAPHRPKEPAWFLATVGVSPDHQGKGLGSAVVLPGVEAAERAGVPAFLETSAPRNLPFYERLGFTVTADVEVPEGPRTWCMTRKPGA

SEQ ID NO: 2993 - protein, 951 aa, Artificial Sequence
  Synthetic Polypeptide
MALPVTALLLPLALLLHAARPDIVMTQSPSSLSASVGDRVTITCKASQSVTNDVAWYQQKPGKAPKLLIYYASNRYTGVPSRFSGSGSGTDFTLTISSLQPEDFATYYCQQDYRSPWTFGGGTKVEIKRGGGGSGGGGSGGGGSQVQLEESGGGVVRPGRSLRLSCAASGFTFSDYGVNWIRQAPGKGLEWVTIIWGDGRTDYNSALKSRFTVSRNNSNNTLSLQMNSLTTEDTAVYYCVRAPGNRAMEYWGQGVLVTVSSTREQKLISEEDLAKPTTTPAPRPPTPAPTIASQPLSLRPEACRPAAGGAVHTRGLDFACDIYIWAPLAGTCGVLLLSLVITLYCKRGRKKLLYIFKQPFMRPVQTTQEEDGCSCRFPEEEEGGCELRVKFSRSADAPAYQQGQNQLYNELNLGRREEYDVLDKRRGRDPEMGGKPRRKNPQEGLYNELQKDKMAEAYSEIGMKGERRRGKGHDGLYQGLSTATKDTYDALHMQALPPRSRGSGATNFSLLKQAGDVEENPGPGIHMATYEVLCEVARKLGTDDREVVLFLLNVFIPQPTLAQLIGALRALKEEGRLTFPLLAECLFRAGRRDLLRDLLHLDPRFLERHLAGTMSYFSPYQLTVLHVDGELCARDIRSLIFLSKDTIGSRSTPQTFLHWVYCMENLDLLGPTDVDALMSMLRSLSRVDLQRQVQTLMGLHLSGPSHSQHYRHTPLETDFYDYKDDDDKTSGSGEGRGSLLTCGDVEENPGPHMTEYKPTVRLATRDDVPRAVRTLAAAFADYPATRHTVDPDRHIERVTELQELFLTRVGLDIGKVWVADDGAAVAVWTTPESVEAGAVFAEIGPRMAELSGSRLAAQQQMEGLLAPHRPKEPAWFLATVGVSPDHQGKGLGSAVVLPGVEAAERAGVPAFLETSAPRNLPFYERLGFTVTADVEVPEGPRTWCMTRKPGA

SEQ ID NO: 2994 - protein, 957 aa, Artificial Sequence
  Synthetic Polypeptide
MALPVTALLLPLALLLHAARPDIQMTQSPSSLSASVGDRVTITCRASQTIWSYLNWYQQRPGKAPNLLIYAASSLQSGVPSRFSGRGSGTDFTLTISSLQAEDFATYYCQQSYSIPQIFGQGTKLEIKGGGGSGGGGSGGGGSQVQLQQSGPGLVKPSQTLSLTCAISGDSVSSNSAAWNWIRQSPSRGLEWLGRTYYRSKWYNDYAVSVKSRITINPDTSKNQFSLQLNSVTPEDTAVYYCAREVTGDLEDAFDIWGQGTMVTVSSTREQKLISEEDLAKPTTTPAPRPPTPAPTIASQPLSLRPEACRPAAGGAVHTRGLDFACDIYIWAPLAGTCGVLLLSLVITLYCKRGRKKLLYIFKQPFMRPVQTTQEEDGCSCRFPEEEEGGCELRVKFSRSADAPAYQQGQNQLYNELNLGRREEYDVLDKRRGRDPEMGGKPRRKNPQEGLYNELQKDKMAEAYSEIGMKGERRRGKGHDGLYQGLSTATKDTYDALHMQALPPRSRGSGATNFSLLKQAGDVEENPGPGIHMATYEVLCEVARKLGTDDREVVLFLLNVFIPQPTLAQLIGALRALKEEGRLTFPLLAECLFRAGRRDLLRDLLHLDPRFLERHLAGTMSYFSPYQLTVLHVDGELCARDIRSLIFLSKDTIGSRSTPQTFLHWVYCMENLDLLGPTDVDALMSMLRSLSRVDLQRQVQTLMGLHLSGPSHSQHYRHTPLETDFYDYKDDDDKTSGSGEGRGSLLTCGDVEENPGPHMTEYKPTVRLATRDDVPRAVRTLAAAFADYPATRHTVDPDRHIERVTELQELFLTRVGLDIGKVWVADDGAAVAVWTTPESVEAGAVFAEIGPRMAELSGSRLAAQQQMEGLLAPHRPKEPAWFLATVGVSPDHQGKGLGSAVVLPGVEAAERAGVPAFLETSAPRNLPFYERLGFTVTADVEVPEGPRTWCMTRKPGA

SEQ ID NO: 2995 - protein, 957 aa, Artificial Sequence
  Synthetic Polypeptide
MALPVTALLLPLALLLHAARPQVQLQQSGPGLVKPSQTLSLTCAISGDSVSSNSAAWNWIRQSPSRGLEWLGRTYYRSKWYNDYAVSVKSRITINPDTSKNQFSLQLNSVTPEDTAVYYCAREVTGDLEDAFDIWGQGTMVTVSSGGGGSGGGGSGGGGSDIQMTQSPSSLSASVGDRVTITCRASQTIWSYLNWYQQRPGKAPNLLIYAASSLQSGVPSRFSGRGSGTDFTLTISSLQAEDFATYYCQQSYSIPQIFGQGTKLEIKTREQKLISEEDLAKPTTTPAPRPPTPAPTIASQPLSLRPEACRPAAGGAVHTRGLDFACDIYIWAPLAGTCGVLLLSLVITLYCKRGRKKLLYIFKQPFMRPVQTTQEEDGCSCRFPEEEEGGCELRVKFSRSADAPAYQQGQNQLYNELNLGRREEYDVLDKRRGRDPEMGGKPRRKNPQEGLYNELQKDKMAEAYSEIGMKGERRRGKGHDGLYQGLSTATKDTYDALHMQALPPRSRGSGATNFSLLKQAGDVEENPGPGIHMATYEVLCEVARKLGTDDREVVLFLLNVFIPQPTLAQLIGALRALKEEGRLTFPLLAECLFRAGRRDLLRDLLHLDPRFLERHLAGTMSYFSPYQLTVLHVDGELCARDIRSLIFLSKDTIGSRSTPQTFLHWVYCMENLDLLGPTDVDALMSMLRSLSRVDLQRQVQTLMGLHLSGPSHSQHYRHTPLETDFYDYKDDDDKTSGSGEGRGSLLTCGDVEENPGPHMTEYKPTVRLATRDDVPRAVRTLAAAFADYPATRHTVDPDRHIERVTELQELFLTRVGLDIGKVWVADDGAAVAVWTTPESVEAGAVFAEIGPRMAELSGSRLAAQQQMEGLLAPHRPKEPAWFLATVGVSPDHQGKGLGSAVVLPGVEAAERAGVPAFLETSAPRNLPFYERLGFTVTADVEVPEGPRTWCMTRKPGA

SEQ ID NO: 2996 - protein, 950 aa, Artificial Sequence
  Synthetic Polypeptide
MALPVTALLLPLALLLHAARPDIQMTQSPATIENTSLSASVGDRVTITCRASQGISSWLTWYQQKPEKAPKSLIYAASSLQSGVPSRFSGSGSGTDFTLTISSLQPEDFATYYCQQYDSYPITFGQGTRLEIKGGGGSGGGGSGGGGSQVQLQQWGAGLLKPSETLSLTCAVYGGSFSAYYWSWIRQPPGKGLEWIGDINHGGGTNYNPSLKSRVTISVDTSKNQFSLKLNSVTAADTAVYYCASLTAYWGQGSLVTVSSTREQKLISEEDLAKPTTTPAPRPPTPAPTIASQPLSLRPEACRPAAGGAVHTRGLDFACDIYIWAPLAGTCGVLLLSLVITLYCKRGRKKLLYIFKQPFMRPVQTTQEEDGCSCRFPEEEEGGCELRVKFSRSADAPAYQQGQNQLYNELNLGRREEYDVLDKRRGRDPEMGGKPRRKNPQEGLYNELQKDKMAEAYSEIGMKGERRRGKGHDGLYQGLSTATKDTYDALHMQALPPRSRGSGATNFSLLKQAGDVEENPGPGIHMATYEVLCEVARKLGTDDREVVLFLLNVFIPQPTLAQLIGALRALKEEGRLTFPLLAECLFRAGRRDLLRDLLHLDPRFLERHLAGTMSYFSPYQLTVLHVDGELCARDIRSLIFLSKDTIGSRSTPQTFLHWVYCMENLDLLGPTDVDALMSMLRSLSRVDLQRQVQTLMGLHLSGPSHSQHYRHTPLETDFYDYKDDDDKTSGSGEGRGSLLTCGDVEENPGPHMTEYKPTVRLATRDDVPRAVRTLAAAFADYPATRHTVDPDRHIERVTELQELFLTRVGLDIGKVWVADDGAAVAVWTTPESVEAGAVFAEIGPRMAELSGSRLAAQQQMEGLLAPHRPKEPAWFLATVGVSPDHQGKGLGSAVVLPGVEAAERAGVPAFLETSAPRNLPFYERLGFTVTADVEVPEGPRTWCMTRKPGA

SEQ ID NO: 2997 - protein, 955 aa, Artificial Sequence
  Synthetic Polypeptide
MALPVTALLLPLALLLHAARPDEIVLTQSPDSLAVSLGERATINCKASQSVDFDGDSYLNWYQQKPGQPPKVLIYAASTLQSGVPSRFSGSGSGTDFTLTINSLEAEDAATYYCQQSNEDPWTFGGGTKVEIKGGGGSGGGGSGGGGSQVQLVQSGAEVKKPGASVKVSCKVSGYTFTDYYITWVRQAPGQALEWMGWIYPGSGNTKYSQKFQGRFVFSVDTSASTAYLQLSSLKAEDTAVYYCANYGNYWFAYWGQGTLVTVSSTREQKLISEEDLAKPTTTPAPRPPTPAPTIASQPLSLRPEACRPAAGGAVHTRGLDFACDIYIWAPLAGTCGVLLLSLVITLYCKRGRKKLLYIFKQPFMRPVQTTQEEDGCSCRFPEEEEGGCELRVKFSRSADAPAYQQGQNQLYNELNLGRREEYDVLDKRRGRDPEMGGKPRRKNPQEGLYNELQKDKMAEAYSEIGMKGERRRGKGHDGLYQGLSTATKDTYDALHMQALPPRSRGSGATNFSLLKQAGDVEENPGPGIHMATYEVLCEVARKLGTDDREVVLFLLNVFIPQPTLAQLIGALRALKEEGRLTFPLLAECLFRAGRRDLLRDLLHLDPRFLERHLAGTMSYFSPYQLTVLHVDGELCARDIRSLIFLSKDTIGSRSTPQTFLHWVYCMENLDLLGPTDVDALMSMLRSLSRVDLQRQVQTLMGLHLSGPSHSQHYRHTPLETDFYDYKDDDDKTSGSGEGRGSLLTCGDVEENPGPHMTEYKPTVRLATRDDVPRAVRTLAAAFADYPATRHTVDPDRHIERVTELQELFLTRVGLDIGKVWVADDGAAVAVWTTPESVEAGAVFAEIGPRMAELSGSRLAAQQQMEGLLAPHRPKEPAWFLATVGVSPDHQGKGLGSAVVLPGVEAAERAGVPAFLETSAPRNLPFYERLGFTVTADVEVPEGPRTWCMTRKPGA

SEQ ID NO: 2998 - protein, 952 aa, Artificial Sequence
  Synthetic Polypeptide
MALPVTALLLPLALLLHAARPDIQMTQSPSSLSASVGDRVTITCRASQGISSWLAWYQQKPEKAPKSLIYAASSLQSGVPSRFSGSGSGTDFTLTISSLQPEDFATYYCQQYNSYPPTFGGGTKVEIKGGGGSGGGGSGGGGSEVQLVQSGGGLVHPGGSLRLSCAGSGFAFSSSTMHWIRQAPGKGLEWISLIGSGGGIYYGDSVKGRFTISRDNAKNSLYLQMNSLRAEDMAVYYCVRGYFDWVDYFDYWGQGTLVTVSSTREQKLISEEDLAKPTTTPAPRPPTPAPTIASQPLSLRPEACRPAAGGAVHTRGLDFACDIYIWAPLAGTCGVLLLSLVITLYCKRGRKKLLYIFKQPFMRPVQTTQEEDGCSCRFPEEEEGGCELRVKFSRSADAPAYQQGQNQLYNELNLGRREEYDVLDKRRGRDPEMGGKPRRKNPQEGLYNELQKDKMAEAYSEIGMKGERRRGKGHDGLYQGLSTATKDTYDALHMQALPPRSRGSGATNFSLLKQAGDVEENPGPGIHMATYEVLCEVARKLGTDDREVVLFLLNVFIPQPTLAQLIGALRALKEEGRLTFPLLAECLFRAGRRDLLRDLLHLDPRFLERHLAGTMSYFSPYQLTVLHVDGELCARDIRSLIFLSKDTIGSRSTPQTFLHWVYCMENLDLLGPTDVDALMSMLRSLSRVDLQRQVQTLMGLHLSGPSHSQHYRHTPLETDFYDYKDDDDKTSGSGEGRGSLLTCGDVEENPGPHMTEYKPTVRLATRDDVPRAVRTLAAAFADYPATRHTVDPDRHIERVTELQELFLTRVGLDIGKVWVADDGAAVAVWTTPESVEAGAVFAEIGPRMAELSGSRLAAQQQMEGLLAPHRPKEPAWFLATVGVSPDHQGKGLGSAVVLPGVEAAERAGVPAFLETSAPRNLPFYERLGFTVTADVEVPEGPRTWCMTRKPGA

SEQ ID NO: 2999 - protein, 962 aa, Artificial Sequence
  Synthetic Polypeptide
MALPVTALLLPLALLLHAARPDDIVMTQSPDSLTVSLGERTTINCKSSQSVLDSSKNKNSLAWYQQKPGQPPKLLLSWASTRESGIPDRFSGSGSGTDFTLTIDSLQPEDSATYYCQQSAHFPITFGQGTRLEIKGGGGSGGGGSGGGGSQVQLVQSGAEVKKPGASVKVSCKASGYTFTNYGMNWVKQAPGQGLKWMGWINTYTGEPTYADDFKGRVTMTSDTSTSTAYLELHNLRSDDTAVYYCARWSWSDGYYVYFDYWGQGTTVTVSSTREQKLISEEDLAKPTTTPAPRPPTPAPTIASQPLSLRPEACRPAAGGAVHTRGLDFACDIYIWAPLAGTCGVLLLSLVITLYCKRGRKKLLYIFKQPFMRPVQTTQEEDGCSCRFPEEEEGGCELRVKFSRSADAPAYQQGQNQLYNELNLGRREEYDVLDKRRGRDPEMGGKPRRKNPQEGLYNELQKDKMAEAYSEIGMKGERRRGKGHDGLYQGLSTATKDTYDALHMQALPPRSRGSGATNFSLLKQAGDVEENPGPGIHMATYEVLCEVARKLGTDDREVVLFLLNVFIPQPTLAQLIGALRALKEEGRLTFPLLAECLFRAGRRDLLRDLLHLDPRFLERHLAGTMSYFSPYQLTVLHVDGELCARDIRSLIFLSKDTIGSRSTPQTFLHWVYCMENLDLLGPTDVDALMSMLRSLSRVDLQRQVQTLMGLHLSGPSHSQHYRHTPLETDFYDYKDDDDKTSGSGEGRGSLLTCGDVEENPGPHMTEYKPTVRLATRDDVPRAVRTLAAAFADYPATRHTVDPDRHIERVTELQELFLTRVGLDIGKVWVADDGAAVAVWTTPESVEAGAVFAEIGPRMAELSGSRLAAQQQMEGLLAPHRPKEPAWFLATVGVSPDHQGKGLGSAVVLPGVEAAERAGVPAFLETSAPRNLPFYERLGFTVTADVEVPEGPRTWCMTRKPGA

SEQ ID NO: 3000 - protein, 958 aa, Artificial Sequence
  Synthetic Polypeptide
MALPVTALLLPLALLLHAARPDEIVLTQSPGSLAVSPGERVTMSCKSSQSVFFSSSQKNYLAWYQQIPGQSPRLLIYWASTRESGVPDRFTGSGSGTDFTLTISSVQPEDLAIYYCHQYLSSRTFGQGTKLEIKRGGGGSGGGGSGGGGSQVQLQQPGAEVVKPGASVKMSCKASGYTFTSYYIHWIKQTPGQGLEWVGVIYPGNDDISYNQKFQGKATLTADKSSTTAYMQLSSLTSEDSAVYYCAREVRLRYFDVWGQGTTVTVSSTREQKLISEEDLAKPTTTPAPRPPTPAPTIASQPLSLRPEACRPAAGGAVHTRGLDFACDIYIWAPLAGTCGVLLLSLVITLYCKRGRKKLLYIFKQPFMRPVQTTQEEDGCSCRFPEEEEGGCELRVKFSRSADAPAYQQGQNQLYNELNLGRREEYDVLDKRRGRDPEMGGKPRRKNPQEGLYNELQKDKMAEAYSEIGMKGERRRGKGHDGLYQGLSTATKDTYDALHMQALPPRSRGSGATNFSLLKQAGDVEENPGPGIHMATYEVLCEVARKLGTDDREVVLFLLNVFIPQPTLAQLIGALRALKEEGRLTFPLLAECLFRAGRRDLLRDLLHLDPRFLERHLAGTMSYFSPYQLTVLHVDGELCARDIRSLIFLSKDTIGSRSTPQTFLHWVYCMENLDLLGPTDVDALMSMLRSLSRVDLQRQVQTLMGLHLSGPSHSQHYRHTPLETDFYDYKDDDDKTSGSGEGRGSLLTCGDVEENPGPHMTEYKPTVRLATRDDVPRAVRTLAAAFADYPATRHTVDPDRHIERVTELQELFLTRVGLDIGKVWVADDGAAVAVWTTPESVEAGAVFAEIGPRMAELSGSRLAAQQQMEGLLAPHRPKEPAWFLATVGVSPDHQGKGLGSAVVLPGVEAAERAGVPAFLETSAPRNLPFYERLGFTVTADVEVPEGPRTWCMTRKPGA

SEQ ID NO: 3001 - protein, 984 aa, Artificial Sequence
  Synthetic Polypeptide
MALPVTALLLPLALLLHAARPYINIYNAEPANPSEKNSPTQYAYGSGEFDIQLTQSPSSLSASVGDRVTITCRASQGISSVLAWYQQKPGKAPKLLIYDASSLESGVPSRFSGSGSGTDFTLTISSLQPEDFATYYCQQFNSSITFGQGTKLEIKRTVAAGGGGSGGGGSGGGGSQVQLVQSGAEVKKPGSSVKVSCKASGGTFSDYAISWVRQAPGQGLEWMGRIIPILGVANYAQKFQGRVTITADKSTRTAYMELSSLRSEDTAVYYCARNWADAFDIWGQGTMVTVSSASTREQKLISEEDLAKPTTTPAPRPPTPAPTIASQPLSLRPEACRPAAGGAVHTRGLDFACDIYIWAPLAGTCGVLLLSLVITLYCKRGRKKLLYIFKQPFMRPVQTTQEEDGCSCRFPEEEEGGCELRVKFSRSADAPAYQQGQNQLYNELNLGRREEYDVLDKRRGRDPEMGGKPRRKNPQEGLYNELQKDKMAEAYSEIGMKGERRRGKGHDGLYQGLSTATKDTYDALHMQALPPRSRGSGATNFSLLKQAGDVEENPGPGIHMATYEVLCEVARKLGTDDREVVLFLLNVFIPQPTLAQLIGALRALKEEGRLTFPLLAECLFRAGRRDLLRDLLHLDPRFLERHLAGTMSYFSPYQLTVLHVDGELCARDIRSLIFLSKDTIGSRSTPQTFLHWVYCMENLDLLGPTDVDALMSMLRSLSRVDLQRQVQTLMGLHLSGPSHSQHYRHTPLETDFYDYKDDDDKTSGSGEGRGSLLTCGDVEENPGPHMTEYKPTVRLATRDDVPRAVRTLAAAFADYPATRHTVDPDRHIERVTELQELFLTRVGLDIGKVWVADDGAAVAVWTTPESVEAGAVFAEIGPRMAELSGSRLAAQQQMEGLLAPHRPKEPAWFLATVGVSPDHQGKGLGSAVVLPGVEAAERAGVPAFLETSAPRNLPFYERLGFTVTADVEVPEGPRTWCMTRKPGA

SEQ ID NO: 3002 - protein, 983 aa, Artificial Sequence
  Synthetic Polypeptide
MALPVTALLLPLALLLHAARPYINIYNAEPANPSEKNSPTQYAYGSGEFDIVMTQSPSSLSASLGGKVTITCKASQDINKYIAWYQHKPGKGPRLLIHYTSTLQPGIPSRFSGSGSGRDYSFSISNLEPEDIATYYCLQYDNLLTFGAGTKLELKRGGGGSGGGGSGGGGSEVKLQQSGPELVKPGTSVKVSCKASGYSFTDYNMYWVKQSHGKSLEWIGYIDPYKGGTIYNQKFKGKATLTVDKSSSTAFMHLNSLTSEDSAVYYCAREMITAYYFDYWGQGSSVTVSSLERTREQKLISEEDLAKPTTTPAPRPPTPAPTIASQPLSLRPEACRPAAGGAVHTRGLDFACDIYIWAPLAGTCGVLLLSLVITLYCKRGRKKLLYIFKQPFMRPVQTTQEEDGCSCRFPEEEEGGCELRVKFSRSADAPAYQQGQNQLYNELNLGRREEYDVLDKRRGRDPEMGGKPRRKNPQEGLYNELQKDKMAEAYSEIGMKGERRRGKGHDGLYQGLSTATKDTYDALHMQALPPRSRGSGATNFSLLKQAGDVEENPGPGIHMATYEVLCEVARKLGTDDREVVLFLLNVFIPQPTLAQLIGALRALKEEGRLTFPLLAECLFRAGRRDLLRDLLHLDPRFLERHLAGTMSYFSPYQLTVLHVDGELCARDIRSLIFLSKDTIGSRSTPQTFLHWVYCMENLDLLGPTDVDALMSMLRSLSRVDLQRQVQTLMGLHLSGPSHSQHYRHTPLETDFYDYKDDDDKTSGSGEGRGSLLTCGDVEENPGPHMTEYKPTVRLATRDDVPRAVRTLAAAFADYPATRHTVDPDRHIERVTELQELFLTRVGLDIGKVWVADDGAAVAVWTTPESVEAGAVFAEIGPRMAELSGSRLAAQQQMEGLLAPHRPKEPAWFLATVGVSPDHQGKGLGSAVVLPGVEAAERAGVPAFLETSAPRNLPFYERLGFTVTADVEVPEGPRTWCMTRKPGA

SEQ ID NO: 3003 - protein, 999 aa, Artificial Sequence
  Synthetic Polypeptide
MALPVTALLLPLALLLHAARPDIQMTQSPSSLSASVGDRVTINCKASQDINSYLSWFQQKPGKAPKTLIYRANRLVDGVPSRFSGSGSGQDYTLTISSLQPEDFATYYCLQYDEFPLTFGGGTKVEIKGGGGSGGGGSGGGGSQVQLVQSGAEVKKPGASVKVSCKASGYTFTNYDINWVRQAPGQGLEWIGWIYPGDGSTKYNEKFKAKATLTADTSTSTAYMELRSLRSDDTAVYYCASGYEDAMDYWGQGTTVTVSSAKPTTTPAPRPPTPAPTIASQPLSLRPEACRPAAGGAVHTRGLDFACDITREQKLISEEDLAKPTTTPAPRPPTPAPTIASQPLSLRPEACRPAAGGAVHTRGLDFACDIYIWAPLAGTCGVLLLSLVITLYCKRGRKKLLYIFKQPFMRPVQTTQEEDGCSCRFPEEEEGGCELRVKFSRSADAPAYQQGQNQLYNELNLGRREEYDVLDKRRGRDPEMGGKPRRKNPQEGLYNELQKDKMAEAYSEIGMKGERRRGKGHDGLYQGLSTATKDTYDALHMQALPPRSRGSGATNFSLLKQAGDVEENPGPGIHMATYEVLCEVARKLGTDDREVVLFLLNVFIPQPTLAQLIGALRALKEEGRLTFPLLAECLFRAGRRDLLRDLLHLDPRFLERHLAGTMSYFSPYQLTVLHVDGELCARDIRSLIFLSKDTIGSRSTPQTFLHWVYCMENLDLLGPTDVDALMSMLRSLSRVDLQRQVQTLMGLHLSGPSHSQHYRHTPLETDFYDYKDDDDKTSGSGEGRGSLLTCGDVEENPGPHMTEYKPTVRLATRDDVPRAVRTLAAAFADYPATRHTVDPDRHIERVTELQELFLTRVGLDIGKVWVADDGAAVAVWTTPESVEAGAVFAEIGPRMAELSGSRLAAQQQMEGLLAPHRPKEPAWFLATVGVSPDHQGKGLGSAVVLPGVEAAERAGVPAFLETSAPRNLPFYERLGFTVTADVEVPEGPRTWCMTRKPGA

SEQ ID NO: 3004 - protein, 955 aa, Artificial Sequence
  Synthetic Polypeptide
MALPVTALLLPLALLLHAARPEIVLTQSPLSLPVTPGEPASISCRSSQSLLHSNGYNYLDWYLQKPGQSPQLLIYLGVNSVSGVPDRFSGSGSGTDFTLKISRVEAEDVGVYYCMQALQTPWTFGQGTKVEIKGGGGSGGGGSGGGGSQVQLVQSGAEVKKPGSSVKVSCKASGGIFSNHAISWVRQAPGQGLEWMGGIIPIFGTANYAQKFQGRVTITADESTSTAFMELSSLRSEDTAVYYCAREWADVFDIWGQGTMVTVSSTREQKLISEEDLAKPTTTPAPRPPTPAPTIASQPLSLRPEACRPAAGGAVHTRGLDFACDIYIWAPLAGTCGVLLLSLVITLYCKRGRKKLLYIFKQPFMRPVQTTQEEDGCSCRFPEEEEGGCELRVKFSRSADAPAYQQGQNQLYNELNLGRREEYDVLDKRRGRDPEMGGKPRRKNPQEGLYNELQKDKMAEAYSEIGMKGERRRGKGHDGLYQGLSTATKDTYDALHMQALPPRSRGSGATNFSLLKQAGDVEENPGPGIHMATYEVLCEVARKLGTDDREVVLFLLNVFIPQPTLAQLIGALRALKEEGRLTFPLLAECLFRAGRRDLLRDLLHLDPRFLERHLAGTMSYFSPYQLTVLHVDGELCARDIRSLIFLSKDTIGSRSTPQTFLHWVYCMENLDLLGPTDVDALMSMLRSLSRVDLQRQVQTLMGLHLSGPSHSQHYRHTPLETDFYDYKDDDDKTSGSGEGRGSLLTCGDVEENPGPHMTEYKPTVRLATRDDVPRAVRTLAAAFADYPATRHTVDPDRHIERVTELQELFLTRVGLDIGKVWVADDGAAVAVWTTPESVEAGAVFAEIGPRMAELSGSRLAAQQQMEGLLAPHRPKEPAWFLATVGVSPDHQGKGLGSAVVLPGVEAAERAGVPAFLETSAPRNLPFYERLGFTVTADVEVPEGPRTWCMTRKPGA

SEQ ID NO: 3005 - protein, 954 aa, Artificial Sequence
  Synthetic Polypeptide
MALPVTALLLPLALLLHAARPDIQMTQSPASLTVSLGQRATISCRASESVDSYGNSYLHWYQQKPGQPPQLLIYLASNLESGVPARFSGSGSRTDFTLTIDPVEADDAATYYCQQNNEDPWTFGGGTKVEIKGGGGSGGGGSGGGGSEVQLQQSGAELVKPGASVKMSCKAFGYTFTTFPIEWMKQSHGKSLEWIGNFHPYNDQTKYNEEFKGRAKLTIDRSSSTVYLELGRLTSDDSAVYYCARGYYYAFDFWGQGTTLTVSSTREQKLISEEDLAKPTTTPAPRPPTPAPTIASQPLSLRPEACRPAAGGAVHTRGLDFACDIYIWAPLAGTCGVLLLSLVITLYCKRGRKKLLYIFKQPFMRPVQTTQEEDGCSCRFPEEEEGGCELRVKFSRSADAPAYQQGQNQLYNELNLGRREEYDVLDKRRGRDPEMGGKPRRKNPQEGLYNELQKDKMAEAYSEIGMKGERRRGKGHDGLYQGLSTATKDTYDALHMQALPPRSRGSGATNFSLLKQAGDVEENPGPGIHMATYEVLCEVARKLGTDDREVVLFLLNVFIPQPTLAQLIGALRALKEEGRLTFPLLAECLFRAGRRDLLRDLLHLDPRFLERHLAGTMSYFSPYQLTVLHVDGELCARDIRSLIFLSKDTIGSRSTPQTFLHWVYCMENLDLLGPTDVDALMSMLRSLSRVDLQRQVQTLMGLHLSGPSHSQHYRHTPLETDFYDYKDDDDKTSGSGEGRGSLLTCGDVEENPGPHMTEYKPTVRLATRDDVPRAVRTLAAAFADYPATRHTVDPDRHIERVTELQELFLTRVGLDIGKVWVADDGAAVAVWTTPESVEAGAVFAEIGPRMAELSGSRLAAQQQMEGLLAPHRPKEPAWFLATVGVSPDHQGKGLGSAVVLPGVEAAERAGVPAFLETSAPRNLPFYERLGFTVTADVEVPEGPRTWCMTRKPGA

SEQ ID NO: 3006 - protein, 951 aa, Artificial Sequence
  Synthetic Polypeptide
MALPVTALLLPLALLLHAARPDIQMTQSPSSLSASVGDRVTITCRASQGIRNDLGWYQQKPGKAPKRLIYAASSLQSGVPSRFSGSGSGTEFTLTISSLQPEDFATYYCLQHNSYPWTFGQGTKLEIKGGGGSGGGGSGGGGSEVQLVESGGALIQPGGSLRLSCVASGFTISGNYMSWVRQAPGKGLEWVSLIYSGDSTYYADSVKGRFTISRDISKNTVYLQMNSLRVEDTAVYYCVRDGYYVSDMVVWGKGTTVTVSSTREQKLISEEDLAKPTTTPAPRPPTPAPTIASQPLSLRPEACRPAAGGAVHTRGLDFACDIYIWAPLAGTCGVLLLSLVITLYCKRGRKKLLYIFKQPFMRPVQTTQEEDGCSCRFPEEEEGGCELRVKFSRSADAPAYQQGQNQLYNELNLGRREEYDVLDKRRGRDPEMGGKPRRKNPQEGLYNELQKDKMAEAYSEIGMKGERRRGKGHDGLYQGLSTATKDTYDALHMQALPPRSRGSGATNFSLLKQAGDVEENPGPGIHMATYEVLCEVARKLGTDDREVVLFLLNVFIPQPTLAQLIGALRALKEEGRLTFPLLAECLFRAGRRDLLRDLLHLDPRFLERHLAGTMSYFSPYQLTVLHVDGELCARDIRSLIFLSKDTIGSRSTPQTFLHWVYCMENLDLLGPTDVDALMSMLRSLSRVDLQRQVQTLMGLHLSGPSHSQHYRHTPLETDFYDYKDDDDKTSGSGEGRGSLLTCGDVEENPGPHMTEYKPTVRLATRDDVPRAVRTLAAAFADYPATRHTVDPDRHIERVTELQELFLTRVGLDIGKVWVADDGAAVAVWTTPESVEAGAVFAEIGPRMAELSGSRLAAQQQMEGLLAPHRPKEPAWFLATVGVSPDHQGKGLGSAVVLPGVEAAERAGVPAFLETSAPRNLPFYERLGFTVTADVEVPEGPRTWCMTRKPGA

SEQ ID NO: 3007 - protein, 961 aa, Artificial Sequence
  Synthetic Polypeptide
MALPVTALLLPLALLLHAARPDVLLTQSPLSLPVTLGQPASISCRSSQTIVHSNGNTYLEWFQQRPGQSPRLLIYQVSNRFSGVPDRFSGSGSGTDFTLKISRVEAEDVGVYYCFQGSHVPRTFGGGTKVEIKRGGGGSGGGGSGGGGSQIQLVQSGSELKKPGASVKVSCKASGYTFTNYGMNWVRQAPGQGLKWMGWINTNTGEPKYAEEFKGRFALSLDTSVSTAYLQINSLKAEDTAVYFCARGYGNYARGAWLAYWGQGTLVTVSSTREQKLISEEDLAKPTTTPAPRPPTPAPTIASQPLSLRPEACRPAAGGAVHTRGLDFACDIYIWAPLAGTCGVLLLSLVITLYCKRGRKKLLYIFKQPFMRPVQTTQEEDGCSCRFPEEEEGGCELRVKFSRSADAPAYQQGQNQLYNELNLGRREEYDVLDKRRGRDPEMGGKPRRKNPQEGLYNELQKDKMAEAYSEIGMKGERRRGKGHDGLYQGLSTATKDTYDALHMQALPPRSRGSGATNFSLLKQAGDVEENPGPGIHMATYEVLCEVARKLGTDDREVVLFLLNVFIPQPTLAQLIGALRALKEEGRLTFPLLAECLFRAGRRDLLRDLLHLDPRFLERHLAGTMSYFSPYQLTVLHVDGELCARDIRSLIFLSKDTIGSRSTPQTFLHWVYCMENLDLLGPTDVDALMSMLRSLSRVDLQRQVQTLMGLHLSGPSHSQHYRHTPLETDFYDYKDDDDKTSGSGEGRGSLLTCGDVEENPGPHMTEYKPTVRLATRDDVPRAVRTLAAAFADYPATRHTVDPDRHIERVTELQELFLTRVGLDIGKVWVADDGAAVAVWTTPESVEAGAVFAEIGPRMAELSGSRLAAQQQMEGLLAPHRPKEPAWFLATVGVSPDHQGKGLGSAVVLPGVEAAERAGVPAFLETSAPRNLPFYERLGFTVTADVEVPEGPRTWCMTRKPGA

SEQ ID NO: 3008 - protein, 948 aa, Artificial Sequence
  Synthetic Polypeptide
MALPVTALLLPLALLLHAARPDEIVLTQSPATLSLSPGERATLSCSASSSINYIYWLQQKPGQAPRILIYLTSNLASGVPARFSGSGSGTDFTLTISSLEPEDFAVYYCLQWSSNPLTFGGGTKVEIKGGGGSGGGGSGGGGSFEVQLVESGGGLVKPGGSLRLSCAASGFTFSSYDMSWVRQAPGKGLEWVSTISSGGSYTYYLDSIKGRFTISRDNAKNSLYLQMNSLRAEDTAVYYCARQGLDYWGRGTLVTVSSTREQKLISEEDLAKPTTTPAPRPPTPAPTIASQPLSLRPEACRPAAGGAVHTRGLDFACDIYIWAPLAGTCGVLLLSLVITLYCKRGRKKLLYIFKQPFMRPVQTTQEEDGCSCRFPEEEEGGCELRVKFSRSADAPAYQQGQNQLYNELNLGRREEYDVLDKRRGRDPEMGGKPRRKNPQEGLYNELQKDKMAEAYSEIGMKGERRRGKGHDGLYQGLSTATKDTYDALHMQALPPRSRGSGATNFSLLKQAGDVEENPGPGIHMATYEVLCEVARKLGTDDREVVLFLLNVFIPQPTLAQLIGALRALKEEGRLTFPLLAECLFRAGRRDLLRDLLHLDPRFLERHLAGTMSYFSPYQLTVLHVDGELCARDIRSLIFLSKDTIGSRSTPQTFLHWVYCMENLDLLGPTDVDALMSMLRSLSRVDLQRQVQTLMGLHLSGPSHSQHYRHTPLETDFYDYKDDDDKTSGSGEGRGSLLTCGDVEENPGPHMTEYKPTVRLATRDDVPRAVRTLAAAFADYPATRHTVDPDRHIERVTELQELFLTRVGLDIGKVWVADDGAAVAVWTTPESVEAGAVFAEIGPRMAELSGSRLAAQQQMEGLLAPHRPKEPAWFLATVGVSPDHQGKGLGSAVVLPGVEAAERAGVPAFLETSAPRNLPFYERLGFTVTADVEVPEGPRTWCMTRKPGA

SEQ ID NO: 3009 - protein, 956 aa, Artificial Sequence
  Synthetic Polypeptide
MALPVTALLLPLALLLHAARPDIVMTQSPDSLAVSLGERATINCRASKSVSTSGYSFMHWYQQKPGQPPKLLIYLASNLESGVPDRFSGSGSGTDFTLTISSLQAEDVAVYYCQHSREVPWTFGQGTKVEIKRGGGGSGGGGSGGGGSQVQLVQSGAEVKKPGASVKVSCKASGYTFTNYGMNWVRQAPGQGLEWMGWINTYTGEPTYADAFKGRFAFSLDTSTSTAYLQINSLRSDDTAVYYCARDYGDYGMDYWGQGTTVTVSSTREQKLISEEDLAKPTTTPAPRPPTPAPTIASQPLSLRPEACRPAAGGAVHTRGLDFACDIYIWAPLAGTCGVLLLSLVITLYCKRGRKKLLYIFKQPFMRPVQTTQEEDGCSCRFPEEEEGGCELRVKFSRSADAPAYQQGQNQLYNELNLGRREEYDVLDKRRGRDPEMGGKPRRKNPQEGLYNELQKDKMAEAYSEIGMKGERRRGKGHDGLYQGLSTATKDTYDALHMQALPPRSRGSGATNFSLLKQAGDVEENPGPGIHMATYEVLCEVARKLGTDDREVVLFLLNVFIPQPTLAQLIGALRALKEEGRLTFPLLAECLFRAGRRDLLRDLLHLDPRFLERHLAGTMSYFSPYQLTVLHVDGELCARDIRSLIFLSKDTIGSRSTPQTFLHWVYCMENLDLLGPTDVDALMSMLRSLSRVDLQRQVQTLMGLHLSGPSHSQHYRHTPLETDFYDYKDDDDKTSGSGEGRGSLLTCGDVEENPGPHMTEYKPTVRLATRDDVPRAVRTLAAAFADYPATRHTVDPDRHIERVTELQELFLTRVGLDIGKVWVADDGAAVAVWTTPESVEAGAVFAEIGPRMAELSGSRLAAQQQMEGLLAPHRPKEPAWFLATVGVSPDHQGKGLGSAVVLPGVEAAERAGVPAFLETSAPRNLPFYERLGFTVTADVEVPEGPRTWCMTRKPGA

SEQ ID NO: 3010 - protein, 952 aa, Artificial Sequence
  Synthetic Polypeptide
MALPVTALLLPLALLLHAARPDIVMTQTPLTLSVTIGQPASISCKSSQSLLDSDGKTYLNWLLQRPGQSPERLIYLVSKLDSGVPDRFTGSGSGTDFTLKISRVEAEDLGVYCCWQGTHFPYTFGGGTKVEIKGGGGGSGGGGSGGGGSQVQLQQPGAELVRPGASVKLSCKASGYTFTSYWMNWVKQRPGQGLEWIGMIDPSDSETHYNHIFKDKATLTVDKSSSTAYLQLSSLTSEDSAVYYCARNLYLWGQGTSVTVSSTREQKLISEEDLAKPTTTPAPRPPTPAPTIASQPLSLRPEACRPAAGGAVHTRGLDFACDIYIWAPLAGTCGVLLLSLVITLYCKRGRKKLLYIFKQPFMRPVQTTQEEDGCSCRFPEEEEGGCELRVKFSRSADAPAYQQGQNQLYNELNLGRREEYDVLDKRRGRDPEMGGKPRRKNPQEGLYNELQKDKMAEAYSEIGMKGERRRGKGHDGLYQGLSTATKDTYDALHMQALPPRSRGSGATNFSLLKQAGDVEENPGPGIHMATYEVLCEVARKLGTDDREVVLFLLNVFIPQPTLAQLIGALRALKEEGRLTFPLLAECLFRAGRRDLLRDLLHLDPRFLERHLAGTMSYFSPYQLTVLHVDGELCARDIRSLIFLSKDTIGSRSTPQTFLHWVYCMENLDLLGPTDVDALMSMLRSLSRVDLQRQVQTLMGLHLSGPSHSQHYRHTPLETDFYDYKDDDDKTSGSGEGRGSLLTCGDVEENPGPHMTEYKPTVRLATRDDVPRAVRTLAAAFADYPATRHTVDPDRHIERVTELQELFLTRVGLDIGKVWVADDGAAVAVWTTPESVEAGAVFAEIGPRMAELSGSRLAAQQQMEGLLAPHRPKEPAWFLATVGVSPDHQGKGLGSAVVLPGVEAAERAGVPAFLETSAPRNLPFYERLGFTVTADVEVPEGPRTWCMTRKPGA

SEQ ID NO: 3011 - protein, 956 aa, Artificial Sequence
  Synthetic Polypeptide
MALPVTALLLPLALLLHAARPDDIQLTQSPSSLSASVGDRVTITCKASQSVDYEGDSFLNWYQQKPGKAPKLLIYAASNLESGVPSRFSGSGSGTDFTLTISSLQPEDFATYYCQQSNEDPLTFGQGTKVEIKRGGGGSGGGGSGGGGSEVQLVESGGGLVQPGGSLRLSCAASGYTFSSYWIEWVRQAPGKGLEWIGEILPGGGDTNYNEIFKGRATFSADTSKNTAYLQMNSLRAEDTAVYYCTRRVPIRLDYWGQGTLVTVSSTREQKLISEEDLAKPTTTPAPRPPTPAPTIASQPLSLRPEACRPAAGGAVHTRGLDFACDIYIWAPLAGTCGVLLLSLVITLYCKRGRKKLLYIFKQPFMRPVQTTQEEDGCSCRFPEEEEGGCELRVKFSRSADAPAYQQGQNQLYNELNLGRREEYDVLDKRRGRDPEMGGKPRRKNPQEGLYNELQKDKMAEAYSEIGMKGERRRGKGHDGLYQGLSTATKDTYDALHMQALPPRSRGSGATNFSLLKQAGDVEENPGPGIHMATYEVLCEVARKLGTDDREVVLFLLNVFIPQPTLAQLIGALRALKEEGRLTFPLLAECLFRAGRRDLLRDLLHLDPRFLERHLAGTMSYFSPYQLTVLHVDGELCARDIRSLIFLSKDTIGSRSTPQTFLHWVYCMENLDLLGPTDVDALMSMLRSLSRVDLQRQVQTLMGLHLSGPSHSQHYRHTPLETDFYDYKDDDDKTSGSGEGRGSLLTCGDVEENPGPHMTEYKPTVRLATRDDVPRAVRTLAAAFADYPATRHTVDPDRHIERVTELQELFLTRVGLDIGKVWVADDGAAVAVWTTPESVEAGAVFAEIGPRMAELSGSRLAAQQQMEGLLAPHRPKEPAWFLATVGVSPDHQGKGLGSAVVLPGVEAAERAGVPAFLETSAPRNLPFYERLGFTVTADVEVPEGPRTWCMTRKPGA

SEQ ID NO: 3012 - protein, 952 aa, Artificial Sequence
  Synthetic Polypeptide
MALPVTALLLPLALLLHAARPDIVMTQTPLSLSVTPGQPASISCKSSQSLLDGDGKTYLNWLLQKPGQSPQRLIYLVSKLDSGVPDRFSGSGSGTDFTLKISRVEAEDVGVYYCWQGTHFPRTFGQGTKLEIKGGGGSGGGGSGGGGSQVQLVQSGAEVKKPGASVKVSCKASGYTFKDTYIHWVRQAPGQGLEWMGRIDPANGNTKYDPKFQGRVTMTRDTSISTAYMELSRLRSDDTAVYYCARRGGVDWGQGTLVTVSSTREQKLISEEDLAKPTTTPAPRPPTPAPTIASQPLSLRPEACRPAAGGAVHTRGLDFACDIYIWAPLAGTCGVLLLSLVITLYCKRGRKKLLYIFKQPFMRPVQTTQEEDGCSCRFPEEEEGGCELRVKFSRSADAPAYQQGQNQLYNELNLGRREEYDVLDKRRGRDPEMGGKPRRKNPQEGLYNELQKDKMAEAYSEIGMKGERRRGKGHDGLYQGLSTATKDTYDALHMQALPPRSRGSGATNFSLLKQAGDVEENPGPGIHMATYEVLCEVARKLGTDDREVVLFLLNVFIPQPTLAQLIGALRALKEEGRLTFPLLAECLFRAGRRDLLRDLLHLDPRFLERHLAGTMSYFSPYQLTVLHVDGELCARDIRSLIFLSKDTIGSRSTPQTFLHWVYCMENLDLLGPTDVDALMSMLRSLSRVDLQRQVQTLMGLHLSGPSHSQHYRHTPLETDFYDYKDDDDKTSGSGEGRGSLLTCGDVEENPGPHMTEYKPTVRLATRDDVPRAVRTLAAAFADYPATRHTVDPDRHIERVTELQELFLTRVGLDIGKVWVADDGAAVAVWTTPESVEAGAVFAEIGPRMAELSGSRLAAQQQMEGLLAPHRPKEPAWFLATVGVSPDHQGKGLGSAVVLPGVEAAERAGVPAFLETSAPRNLPFYERLGFTVTADVEVPEGPRTWCMTRKPGA

SEQ ID NO: 3013 - protein, 960 aa, Artificial Sequence
  Synthetic Polypeptide
MALPVTALLLPLALLLHAARPDIVMTQSPDSLAVSLGERATINCESSQSLLNSGNQKNYLTWYQQKPGQPPKPLIYWASTRESGVPDRFSGSGSGTDFTLTISSLQAEDVAVYYCQNDYSYPYTFGQGTKLEIKRGGGGSGGGGSGGGGSEVQLVQSGAEVKKPGESLKISCKGSGYSFTDYYMKWARQMPGKGLEWMGDIIPSNGATFYNQKFKGQVTISADKSISTTYLQWSSLKASDTAMYYCARSHLLRASWFAYWGQGTMVTVSSTREQKLISEEDLAKPTTTPAPRPPTPAPTIASQPLSLRPEACRPAAGGAVHTRGLDFACDIYIWAPLAGTCGVLLLSLVITLYCKRGRKKLLYIFKQPFMRPVQTTQEEDGCSCRFPEEEEGGCELRVKFSRSADAPAYQQGQNQLYNELNLGRREEYDVLDKRRGRDPEMGGKPRRKNPQEGLYNELQKDKMAEAYSEIGMKGERRRGKGHDGLYQGLSTATKDTYDALHMQALPPRSRGSGATNFSLLKQAGDVEENPGPGIHMATYEVLCEVARKLGTDDREVVLFLLNVFIPQPTLAQLIGALRALKEEGRLTFPLLAECLFRAGRRDLLRDLLHLDPRFLERHLAGTMSYFSPYQLTVLHVDGELCARDIRSLIFLSKDTIGSRSTPQTFLHWVYCMENLDLLGPTDVDALMSMLRSLSRVDLQRQVQTLMGLHLSGPSHSQHYRHTPLETDFYDYKDDDDKTSGSGEGRGSLLTCGDVEENPGPHMTEYKPTVRLATRDDVPRAVRTLAAAFADYPATRHTVDPDRHIERVTELQELFLTRVGLDIGKVWVADDGAAVAVWTTPESVEAGAVFAEIGPRMAELSGSRLAAQQQMEGLLAPHRPKEPAWFLATVGVSPDHQGKGLGSAVVLPGVEAAERAGVPAFLETSAPRNLPFYERLGFTVTADVEVPEGPRTWCMTRKPGA

SEQ ID NO: 3014 - protein, 955 aa, Artificial Sequence
  Synthetic Polypeptide
MALPVTALLLPLALLLHAARPDIVLTQSPASLAVSLGQRATISCRASESVDNYGNTFMHWYQQKPGQPPKLLIYRASNLESGIPARFSGSGSRTDFTLTINPVEADDVATYYCQQSNEDPPTFGAGTKLELKGGGGSGGGGSGGGGSQIQLVQSGPELKKPGETVKISCKASGYIFTNYGMNWVKQAPGKSFKWMGWINTYTGESTYSADFKGRFAFSLETSASTAYLHINDLKNEDTATYFCARSGGYDPMDYWGQGTSVTVSSTREQKLISEEDLAKPTTTPAPRPPTPAPTIASQPLSLRPEACRPAAGGAVHTRGLDFACDIYIWAPLAGTCGVLLLSLVITLYCKRGRKKLLYIFKQPFMRPVQTTQEEDGCSCRFPEEEEGGCELRVKFSRSADAPAYQQGQNQLYNELNLGRREEYDVLDKRRGRDPEMGGKPRRKNPQEGLYNELQKDKMAEAYSEIGMKGERRRGKGHDGLYQGLSTATKDTYDALHMQALPPRSRGSGATNFSLLKQAGDVEENPGPGIHMATYEVLCEVARKLGTDDREVVLFLLNVFIPQPTLAQLIGALRALKEEGRLTFPLLAECLFRAGRRDLLRDLLHLDPRFLERHLAGTMSYFSPYQLTVLHVDGELCARDIRSLIFLSKDTIGSRSTPQTFLHWVYCMENLDLLGPTDVDALMSMLRSLSRVDLQRQVQTLMGLHLSGPSHSQHYRHTPLETDFYDYKDDDDKTSGSGEGRGSLLTCGDVEENPGPHMTEYKPTVRLATRDDVPRAVRTLAAAFADYPATRHTVDPDRHIERVTELQELFLTRVGLDIGKVWVADDGAAVAVWTTPESVEAGAVFAEIGPRMAELSGSRLAAQQQMEGLLAPHRPKEPAWFLATVGVSPDHQGKGLGSAVVLPGVEAAERAGVPAFLETSAPRNLPFYERLGFTVTADVEVPEGPRTWCMTRKPGA

SEQ ID NO: 3015 - protein, 959 aa, Artificial Sequence
  Synthetic Polypeptide
MALPVTALLLPLALLLHAARPDFVMTQSPDSLAVSLGERVTMSCKSSQSLLNSGNQKNYLTWYQQKPGQPPKLLIYWASTRESGVPDRFSGSGSGTDFTLTISSLQAEDVAVYYCQNDYSYPYTFGQGTKLEIKGGGGSGGGGSGGGGSEVQLVQSGAELKKPGASVKVSCKASGYTFTDYYMKWVRQAPGQGLEWIGDIIPSNGATFYNQKFKGRVTITVDKSTSTAYMELSSLRSEDTAVYYCARSHLLRASWFAYWGQGTLVTVSSTREQKLISEEDLAKPTTTPAPRPPTPAPTIASQPLSLRPEACRPAAGGAVHTRGLDFACDIYIWAPLAGTCGVLLLSLVITLYCKRGRKKLLYIFKQPFMRPVQTTQEEDGCSCRFPEEEEGGCELRVKFSRSADAPAYQQGQNQLYNELNLGRREEYDVLDKRRGRDPEMGGKPRRKNPQEGLYNELQKDKMAEAYSEIGMKGERRRGKGHDGLYQGLSTATKDTYDALHMQALPPRSRGSGATNFSLLKQAGDVEENPGPGIHMATYEVLCEVARKLGTDDREVVLFLLNVFIPQPTLAQLIGALRALKEEGRLTFPLLAECLFRAGRRDLLRDLLHLDPRFLERHLAGTMSYFSPYQLTVLHVDGELCARDIRSLIFLSKDTIGSRSTPQTFLHWVYCMENLDLLGPTDVDALMSMLRSLSRVDLQRQVQTLMGLHLSGPSHSQHYRHTPLETDFYDYKDDDDKTSGSGEGRGSLLTCGDVEENPGPHMTEYKPTVRLATRDDVPRAVRTLAAAFADYPATRHTVDPDRHIERVTELQELFLTRVGLDIGKVWVADDGAAVAVWTTPESVEAGAVFAEIGPRMAELSGSRLAAQQQMEGLLAPHRPKEPAWFLATVGVSPDHQGKGLGSAVVLPGVEAAERAGVPAFLETSAPRNLPFYERLGFTVTADVEVPEGPRTWCMTRKPGA

SEQ ID NO: 3016 - protein, 959 aa, Artificial Sequence
  Synthetic Polypeptide
MALPVTALLLPLALLLHAARPDFVMTQSPDSLAVSLGERVTMSCKSSQSLLNSGNQKNYLTWYQQKPGQPPKLLIYWASTRESGVPDRFSGSGSGTDFTLTISSLQAEDVAVYYCQNDYSYPYTFGQGTKLEIKGGGGSGGGGSGGGGSQVQLVQSGAELKKPGASVKVSCKASGYTFTDYYMKWVRQAPGQGLEWIGDIIPSNGATFYNQKFKGRVTITVDKSTSTAYMELSSLRSEDTAVYYCARSHLLRASWFAYWGQGTLVTVSSTREQKLISEEDLAKPTTTPAPRPPTPAPTIASQPLSLRPEACRPAAGGAVHTRGLDFACDIYIWAPLAGTCGVLLLSLVITLYCKRGRKKLLYIFKQPFMRPVQTTQEEDGCSCRFPEEEEGGCELRVKFSRSADAPAYQQGQNQLYNELNLGRREEYDVLDKRRGRDPEMGGKPRRKNPQEGLYNELQKDKMAEAYSEIGMKGERRRGKGHDGLYQGLSTATKDTYDALHMQALPPRSRGSGATNFSLLKQAGDVEENPGPGIHMATYEVLCEVARKLGTDDREVVLFLLNVFIPQPTLAQLIGALRALKEEGRLTFPLLAECLFRAGRRDLLRDLLHLDPRFLERHLAGTMSYFSPYQLTVLHVDGELCARDIRSLIFLSKDTIGSRSTPQTFLHWVYCMENLDLLGPTDVDALMSMLRSLSRVDLQRQVQTLMGLHLSGPSHSQHYRHTPLETDFYDYKDDDDKTSGSGEGRGSLLTCGDVEENPGPHMTEYKPTVRLATRDDVPRAVRTLAAAFADYPATRHTVDPDRHIERVTELQELFLTRVGLDIGKVWVADDGAAVAVWTTPESVEAGAVFAEIGPRMAELSGSRLAAQQQMEGLLAPHRPKEPAWFLATVGVSPDHQGKGLGSAVVLPGVEAAERAGVPAFLETSAPRNLPFYERLGFTVTADVEVPEGPRTWCMTRKPGA

SEQ ID NO: 3017 - protein, 953 aa, Artificial Sequence
  Synthetic Polypeptide
MALPVTALLLPLALLLHAARPEIVLTQSPGTLSLSPGERATLSCRASQSVSSSYLAWYQQKPGQAPRLLIYGASSRATGIPDRFSGSGSGTDFTLTISRLEPEDFAVYYCQQDYGFPWTFGQGTKVEIKRGGGGSGGGGSGGGGSEVQLVQSGAEVKKPGESLKISCKGSGYSFTSYWISWVRQMPGKGLEWMGIIDPSDSDTRYSPSFQGQVTISADKSISTAYLQWSSLKASDTAMYYCARGDGSTDLDYWGQGTLVTVSSTREQKLISEEDLAKPTTTPAPRPPTPAPTIASQPLSLRPEACRPAAGGAVHTRGLDFACDIYIWAPLAGTCGVLLLSLVITLYCKRGRKKLLYIFKQPFMRPVQTTQEEDGCSCRFPEEEEGGCELRVKFSRSADAPAYQQGQNQLYNELNLGRREEYDVLDKRRGRDPEMGGKPRRKNPQEGLYNELQKDKMAEAYSEIGMKGERRRGKGHDGLYQGLSTATKDTYDALHMQALPPRSRGSGATNFSLLKQAGDVEENPGPGIHMATYEVLCEVARKLGTDDREVVLFLLNVFIPQPTLAQLIGALRALKEEGRLTFPLLAECLFRAGRRDLLRDLLHLDPRFLERHLAGTMSYFSPYQLTVLHVDGELCARDIRSLIFLSKDTIGSRSTPQTFLHWVYCMENLDLLGPTDVDALMSMLRSLSRVDLQRQVQTLMGLHLSGPSHSQHYRHTPLETDFYDYKDDDDKTSGSGEGRGSLLTCGDVEENPGPHMTEYKPTVRLATRDDVPRAVRTLAAAFADYPATRHTVDPDRHIERVTELQELFLTRVGLDIGKVWVADDGAAVAVWTTPESVEAGAVFAEIGPRMAELSGSRLAAQQQMEGLLAPHRPKEPAWFLATVGVSPDHQGKGLGSAVVLPGVEAAERAGVPAFLETSAPRNLPFYERLGFTVTADVEVPEGPRTWCMTRKPGA

SEQ ID NO: 3018 - protein, 955 aa, Artificial Sequence
  Synthetic Polypeptide
MALPVTALLLPLALLLHAARPQFVLTQPPSVSTNPGSTVKLSCKRNTGNIGSNYVNWYQQKPGQSPTTMIYRDDKRPDGVPDRFSGSIDRSSNSALLTINNVQTEDEADYFCQSYSSGINIIFGGGTKLTVLGGGGSGGGGSGGGGSQVQLQESGPGLVKPSETLSLTCTVSGFSLTTYDVHWVRQPPGKGLEWMGRIQNAGITDYNSALKSRLIISRDTSKSQVFLKMNSVTTADTAMYFCAKTGSYFYAFDHWGQGTLVTVSSTREQKLISEEDLAKPTTTPAPRPPTPAPTIASQPLSLRPEACRPAAGGAVHTRGLDFACDIYIWAPLAGTCGVLLLSLVITLYCKRGRKKLLYIFKQPFMRPVQTTQEEDGCSCRFPEEEEGGCELRVKFSRSADAPAYQQGQNQLYNELNLGRREEYDVLDKRRGRDPEMGGKPRRKNPQEGLYNELQKDKMAEAYSEIGMKGERRRGKGHDGLYQGLSTATKDTYDALHMQALPPRSRGSGATNFSLLKQAGDVEENPGPGIHMATYEVLCEVARKLGTDDREVVLFLLNVFIPQPTLAQLIGALRALKEEGRLTFPLLAECLFRAGRRDLLRDLLHLDPRFLERHLAGTMSYFSPYQLTVLHVDGELCARDIRSLIFLSKDTIGSRSTPQTFLHWVYCMENLDLLGPTDVDALMSMLRSLSRVDLQRQVQTLMGLHLSGPSHSQHYRHTPLETDFYDYKDDDDKTSGSGEGRGSLLTCGDVEENPGPHMTEYKPTVRLATRDDVPRAVRTLAAAFADYPATRHTVDPDRHIERVTELQELFLTRVGLDIGKVWVADDGAAVAVWTTPESVEAGAVFAEIGPRMAELSGSRLAAQQQMEGLLAPHRPKEPAWFLATVGVSPDHQGKGLGSAVVLPGVEAAERAGVPAFLETSAPRNLPFYERLGFTVTADVEVPEGPRTWCMTRKPGA

SEQ ID NO: 3019 - protein, 952 aa, Artificial Sequence
  Synthetic Polypeptide
MALPVTALLLPLALLLHAARPDIQMTQSPASLSASLGETVTIECRPSEDIHSNVAWYQQKPGNSPQLLIYDASNLADGVPSRFSGSGSGTQYSLKINSLQSEDVASYFCHQYNIYPYTFGSGTKLELKGGGGSGGGGSGGGGSQVQLQESGPTLVKPGDSVKMSCKASGYTFTDYIIHWVKQSHGKSLEWIGYINPYSDGTNYNEKFKSKATLTVDKSTSTAYMEFSRLTSEDSAIYFCALNYGSYYAMDAWGQGTSVTVSSTREQKLISEEDLAKPTTTPAPRPPTPAPTIASQPLSLRPEACRPAAGGAVHTRGLDFACDIYIWAPLAGTCGVLLLSLVITLYCKRGRKKLLYIFKQPFMRPVQTTQEEDGCSCRFPEEEEGGCELRVKFSRSADAPAYQQGQNQLYNELNLGRREEYDVLDKRRGRDPEMGGKPRRKNPQEGLYNELQKDKMAEAYSEIGMKGERRRGKGHDGLYQGLSTATKDTYDALHMQALPPRSRGSGATNFSLLKQAGDVEENPGPGIHMATYEVLCEVARKLGTDDREVVLFLLNVFIPQPTLAQLIGALRALKEEGRLTFPLLAECLFRAGRRDLLRDLLHLDPRFLERHLAGTMSYFSPYQLTVLHVDGELCARDIRSLIFLSKDTIGSRSTPQTFLHWVYCMENLDLLGPTDVDALMSMLRSLSRVDLQRQVQTLMGLHLSGPSHSQHYRHTPLETDFYDYKDDDDKTSGSGEGRGSLLTCGDVEENPGPHMTEYKPTVRLATRDDVPRAVRTLAAAFADYPATRHTVDPDRHIERVTELQELFLTRVGLDIGKVWVADDGAAVAVWTTPESVEAGAVFAEIGPRMAELSGSRLAAQQQMEGLLAPHRPKEPAWFLATVGVSPDHQGKGLGSAVVLPGVEAAERAGVPAFLETSAPRNLPFYERLGFTVTADVEVPEGPRTWCMTRKPGA

SEQ ID NO: 3020 - protein, 953 aa, Artificial Sequence
  Synthetic Polypeptide
MALPVTALLLPLALLLHAARPEIVLTQSPATLSLSPGERATLSCRASQSVSSYLAWYQQKPGQAPRLLIYDASNRATGIPARFSGSGSGTDFTLTISSLEPEDFAVYYCQQRSNWPLTFGQGTKVEIKRGGGGSGGGGSGGGGSEVQLLESGGGLVQPGGSLRLSCAASGFTFSGYWMHWVRQAPGKGLEWVSAIRSDGSSKYYADSVKGRFTISRDNSKNTLYLQMNSLRAEDTAVYYCAKDGVIEDTFDYWGQGTLVTVSSTREQKLISEEDLAKPTTTPAPRPPTPAPTIASQPLSLRPEACRPAAGGAVHTRGLDFACDIYIWAPLAGTCGVLLLSLVITLYCKRGRKKLLYIFKQPFMRPVQTTQEEDGCSCRFPEEEEGGCELRVKFSRSADAPAYQQGQNQLYNELNLGRREEYDVLDKRRGRDPEMGGKPRRKNPQEGLYNELQKDKMAEAYSEIGMKGERRRGKGHDGLYQGLSTATKDTYDALHMQALPPRSRGSGATNFSLLKQAGDVEENPGPGIHMATYEVLCEVARKLGTDDREVVLFLLNVFIPQPTLAQLIGALRALKEEGRLTFPLLAECLFRAGRRDLLRDLLHLDPRFLERHLAGTMSYFSPYQLTVLHVDGELCARDIRSLIFLSKDTIGSRSTPQTFLHWVYCMENLDLLGPTDVDALMSMLRSLSRVDLQRQVQTLMGLHLSGPSHSQHYRHTPLETDFYDYKDDDDKTSGSGEGRGSLLTCGDVEENPGPHMTEYKPTVRLATRDDVPRAVRTLAAAFADYPATRHTVDPDRHIERVTELQELFLTRVGLDIGKVWVADDGAAVAVWTTPESVEAGAVFAEIGPRMAELSGSRLAAQQQMEGLLAPHRPKEPAWFLATVGVSPDHQGKGLGSAVVLPGVEAAERAGVPAFLETSAPRNLPFYERLGFTVTADVEVPEGPRTWCMTRKPGA

SEQ ID NO: 3021 - protein, 949 aa, Artificial Sequence
  Synthetic Polypeptide
MALPVTALLLPLALLLHAARPDVQITQSPSYLAASPGETITINCRASKSISKDLAWYQEKPGKTNKLLIYSGSTLQSGIPSRFSGSGSGTDFTLTISSLEPEDFAMYYCQQHNKYPYTFGGGTKLEIKRGGGGSGGGGSGGGGSQVQLQQPGAELVRPGASVKLSCKASGYTFTSYWMNWVKQRPDQGLEWIGRIDPYDSETHYNQKFKDKAILTVDKSSSTAYMQLSSLTSEDSAVYYCARGNWDDYWGQGTTLTVSSTREQKLISEEDLAKPTTTPAPRPPTPAPTIASQPLSLRPEACRPAAGGAVHTRGLDFACDIYIWAPLAGTCGVLLLSLVITLYCKRGRKKLLYIFKQPFMRPVQTTQEEDGCSCRFPEEEEGGCELRVKFSRSADAPAYQQGQNQLYNELNLGRREEYDVLDKRRGRDPEMGGKPRRKNPQEGLYNELQKDKMAEAYSEIGMKGERRRGKGHDGLYQGLSTATKDTYDALHMQALPPRSRGSGATNFSLLKQAGDVEENPGPGIHMATYEVLCEVARKLGTDDREVVLFLLNVFIPQPTLAQLIGALRALKEEGRLTFPLLAECLFRAGRRDLLRDLLHLDPRFLERHLAGTMSYFSPYQLTVLHVDGELCARDIRSLIFLSKDTIGSRSTPQTFLHWVYCMENLDLLGPTDVDALMSMLRSLSRVDLQRQVQTLMGLHLSGPSHSQHYRHTPLETDFYDYKDDDDKTSGSGEGRGSLLTCGDVEENPGPHMTEYKPTVRLATRDDVPRAVRTLAAAFADYPATRHTVDPDRHIERVTELQELFLTRVGLDIGKVWVADDGAAVAVWTTPESVEAGAVFAEIGPRMAELSGSRLAAQQQMEGLLAPHRPKEPAWFLATVGVSPDHQGKGLGSAVVLPGVEAAERAGVPAFLETSAPRNLPFYERLGFTVTADVEVPEGPRTWCMTRKPGA

SEQ ID NO: 3022 - protein, 980 aa, Artificial Sequence
  Synthetic Polypeptide
MALPVTALLLPLALLLHAARPYINIYNAEPANPSEKNSPTQYAYGSGEFDIQMTQSPASLSASLGETVTIECRTSKDIYSNLAWFQQEPGNSPQLLIYDASNLADGVPSRFSGSGSGTQYSLQINNLQSEDVASYFCHQYNNYPYTFGTGTKLELKGGGGSGGGGSGGGGSQVQLQESGPTLVNPGDSVKMSCKASGYTFTDHIIHWVKQSHGKSLEWIGYINPYSGGANYNGKFKSKATLTIDKSSSTAYMEFSRLTSGDSAIYYCALNYGSYYAMDAWGQGTSVTVSSTREQKLISEEDLAKPTTTPAPRPPTPAPTIASQPLSLRPEACRPAAGGAVHTRGLDFACDIYIWAPLAGTCGVLLLSLVITLYCKRGRKKLLYIFKQPFMRPVQTTQEEDGCSCRFPEEEEGGCELRVKFSRSADAPAYQQGQNQLYNELNLGRREEYDVLDKRRGRDPEMGGKPRRKNPQEGLYNELQKDKMAEAYSEIGMKGERRRGKGHDGLYQGLSTATKDTYDALHMQALPPRSRGSGATNFSLLKQAGDVEENPGPGIHMATYEVLCEVARKLGTDDREVVLFLLNVFIPQPTLAQLIGALRALKEEGRLTFPLLAECLFRAGRRDLLRDLLHLDPRFLERHLAGTMSYFSPYQLTVLHVDGELCARDIRSLIFLSKDTIGSRSTPQTFLHWVYCMENLDLLGPTDVDALMSMLRSLSRVDLQRQVQTLMGLHLSGPSHSQHYRHTPLETDFYDYKDDDDKTSGSGEGRGSLLTCGDVEENPGPHMTEYKPTVRLATRDDVPRAVRTLAAAFADYPATRHTVDPDRHIERVTELQELFLTRVGLDIGKVWVADDGAAVAVWTTPESVEAGAVFAEIGPRMAELSGSRLAAQQQMEGLLAPHRPKEPAWFLATVGVSPDHQGKGLGSAVVLPGVEAAERAGVPAFLETSAPRNLPFYERLGFTVTADVEVPEGPRTWCMTRKPGA

SEQ ID NO: 3023 - protein, 951 aa, Artificial Sequence
  Synthetic Polypeptide
MALPVTALLLPLALLLHAARPEIVLTQSPTSMTASPGEQVTITCRASSSINYMHWYQQKPGASPRPWIYETSKLASGVPDRFSGSASGTSYSLTINNMEAEDAATYYCQQWNYPSWTFGGGTKLELKGGGGSGGGGSGGGGSEVQLVESGGGLVQPGRSLKLSCAASGFTFSDYNMAWVRQAPKKGLEWVATILYDGGRTYYRGSVKGRFTISRDNAKSTLYLRMDSLRSEDTATYYCATHSRGTDYFDYWGQGVMVTVSSTREQKLISEEDLAKPTTTPAPRPPTPAPTIASQPLSLRPEACRPAAGGAVHTRGLDFACDIYIWAPLAGTCGVLLLSLVITLYCKRGRKKLLYIFKQPFMRPVQTTQEEDGCSCRFPEEEEGGCELRVKFSRSADAPAYQQGQNQLYNELNLGRREEYDVLDKRRGRDPEMGGKPRRKNPQEGLYNELQKDKMAEAYSEIGMKGERRRGKGHDGLYQGLSTATKDTYDALHMQALPPRSRGSGATNFSLLKQAGDVEENPGPGIHMATYEVLCEVARKLGTDDREVVLFLLNVFIPQPTLAQLIGALRALKEEGRLTFPLLAECLFRAGRRDLLRDLLHLDPRFLERHLAGTMSYFSPYQLTVLHVDGELCARDIRSLIFLSKDTIGSRSTPQTFLHWVYCMENLDLLGPTDVDALMSMLRSLSRVDLQRQVQTLMGLHLSGPSHSQHYRHTPLETDFYDYKDDDDKTSGSGEGRGSLLTCGDVEENPGPHMTEYKPTVRLATRDDVPRAVRTLAAAFADYPATRHTVDPDRHIERVTELQELFLTRVGLDIGKVWVADDGAAVAVWTTPESVEAGAVFAEIGPRMAELSGSRLAAQQQMEGLLAPHRPKEPAWFLATVGVSPDHQGKGLGSAVVLPGVEAAERAGVPAFLETSAPRNLPFYERLGFTVTADVEVPEGPRTWCMTRKPGA

SEQ ID NO: 3024 - protein, 960 aa, Artificial Sequence
  Synthetic Polypeptide
MALPVTALLLPLALLLHAARPDIVMTQSPSSLAVSEGETVTINCKSSQSFLSSGDGKNYVAWYQYKPGQSPKLLIYWASTRQSGVPDRFIGSGSGTDFTLTISTVQAEDLAIYYCQQYYDTPLTFGSGTKLEIKGGGGSGGGGSGGGGSEVKLQESGPSLVQSSQTLSLTCTVSGFSLTSYHIHWVRQTPGKGLEWMGVMWSDGDTSYNSALKSRLSISRDTSQSQVFLKMNSLQTEDTATYYCARGYYSSYLYLWFAYWGQGTLVTVSSTREQKLISEEDLAKPTTTPAPRPPTPAPTIASQPLSLRPEACRPAAGGAVHTRGLDFACDIYIWAPLAGTCGVLLLSLVITLYCKRGRKKLLYIFKQPFMRPVQTTQEEDGCSCRFPEEEEGGCELRVKFSRSADAPAYQQGQNQLYNELNLGRREEYDVLDKRRGRDPEMGGKPRRKNPQEGLYNELQKDKMAEAYSEIGMKGERRRGKGHDGLYQGLSTATKDTYDALHMQALPPRSRGSGATNFSLLKQAGDVEENPGPGIHMATYEVLCEVARKLGTDDREVVLFLLNVFIPQPTLAQLIGALRALKEEGRLTFPLLAECLFRAGRRDLLRDLLHLDPRFLERHLAGTMSYFSPYQLTVLHVDGELCARDIRSLIFLSKDTIGSRSTPQTFLHWVYCMENLDLLGPTDVDALMSMLRSLSRVDLQRQVQTLMGLHLSGPSHSQHYRHTPLETDFYDYKDDDDKTSGSGEGRGSLLTCGDVEENPGPHMTEYKPTVRLATRDDVPRAVRTLAAAFADYPATRHTVDPDRHIERVTELQELFLTRVGLDIGKVWVADDGAAVAVWTTPESVEAGAVFAEIGPRMAELSGSRLAAQQQMEGLLAPHRPKEPAWFLATVGVSPDHQGKGLGSAVVLPGVEAAERAGVPAFLETSAPRNLPFYERLGFTVTADVEVPEGPRTWCMTRKPGA

SEQ ID NO: 3025 - protein, 964 aa, Artificial Sequence
  Synthetic Polypeptide
MALPVTALLLPLALLLHAARPDVLMTQTPVSLPVSLGGQVSISCRSSQSLVHSDGDTYLHWYLQKPGQSPQLLIYRVSNRFSGVPDRFSGSGSGTDFTLKISRVEPEDLGLYYCLQTTHFPPWTFGGGTKLEMKGGGGSGGGGSGGGGSQVQLQQSGPELRRPGSSVRLSCKASGYRIKDFLIHWIKNRPEHGLEWIGWIDPEDGETKYAQKFQTKATLTADTSSNTAYMQLSSLTSEDTATYFCARWGDVYYGLMRGHVMDAWGQGTSVTVSSTREQKLISEEDLAKPTTTPAPRPPTPAPTIASQPLSLRPEACRPAAGGAVHTRGLDFACDIYIWAPLAGTCGVLLLSLVITLYCKRGRKKLLYIFKQPFMRPVQTTQEEDGCSCRFPEEEEGGCELRVKFSRSADAPAYQQGQNQLYNELNLGRREEYDVLDKRRGRDPEMGGKPRRKNPQEGLYNELQKDKMAEAYSEIGMKGERRRGKGHDGLYQGLSTATKDTYDALHMQALPPRSRGSGATNFSLLKQAGDVEENPGPGIHMATYEVLCEVARKLGTDDREVVLFLLNVFIPQPTLAQLIGALRALKEEGRLTFPLLAECLFRAGRRDLLRDLLHLDPRFLERHLAGTMSYFSPYQLTVLHVDGELCARDIRSLIFLSKDTIGSRSTPQTFLHWVYCMENLDLLGPTDVDALMSMLRSLSRVDLQRQVQTLMGLHLSGPSHSQHYRHTPLETDFYDYKDDDDKTSGSGEGRGSLLTCGDVEENPGPHMTEYKPTVRLATRDDVPRAVRTLAAAFADYPATRHTVDPDRHIERVTELQELFLTRVGLDIGKVWVADDGAAVAVWTTPESVEAGAVFAEIGPRMAELSGSRLAAQQQMEGLLAPHRPKEPAWFLATVGVSPDHQGKGLGSAVVLPGVEAAERAGVPAFLETSAPRNLPFYERLGFTVTADVEVPEGPRTWCMTRKPGA

SEQ ID NO: 3026 - protein, 955 aa, Artificial Sequence
  Synthetic Polypeptide
MALPVTALLLPLALLLHAARPDIQMTQSTSSLSASLGDRVTISCSASQGINNYLNWYQQKPDGTVELLIYYTSTLQSGVPSRFSGSGSGTDYSLTISNLEPEDIGTYYCQQYSKLPRTFGGGTKLEIKGGGGSGGGGSGGGGSQVQLQQSGSELMMPGASVKISCKATGYTFSNYWIEWVKQRPGHGLEWIGEILPGTGRTIYNEKFKGKATFTADISSNTVQMQLSSLTSEDSAVYYCARRDYYGNFYYAMDYWGQGTSVTVSSTREQKLISEEDLAKPTTTPAPRPPTPAPTIASQPLSLRPEACRPAAGGAVHTRGLDFACDIYIWAPLAGTCGVLLLSLVITLYCKRGRKKLLYIFKQPFMRPVQTTQEEDGCSCRFPEEEEGGCELRVKFSRSADAPAYQQGQNQLYNELNLGRREEYDVLDKRRGRDPEMGGKPRRKNPQEGLYNELQKDKMAEAYSEIGMKGERRRGKGHDGLYQGLSTATKDTYDALHMQALPPRSRGSGATNFSLLKQAGDVEENPGPGIHMATYEVLCEVARKLGTDDREVVLFLLNVFIPQPTLAQLIGALRALKEEGRLTFPLLAECLFRAGRRDLLRDLLHLDPRFLERHLAGTMSYFSPYQLTVLHVDGELCARDIRSLIFLSKDTIGSRSTPQTFLHWVYCMENLDLLGPTDVDALMSMLRSLSRVDLQRQVQTLMGLHLSGPSHSQHYRHTPLETDFYDYKDDDDKTSGSGEGRGSLLTCGDVEENPGPHMTEYKPTVRLATRDDVPRAVRTLAAAFADYPATRHTVDPDRHIERVTELQELFLTRVGLDIGKVWVADDGAAVAVWTTPESVEAGAVFAEIGPRMAELSGSRLAAQQQMEGLLAPHRPKEPAWFLATVGVSPDHQGKGLGSAVVLPGVEAAERAGVPAFLETSAPRNLPFYERLGFTVTADVEVPEGPRTWCMTRKPGA

SEQ ID NO: 3027 - protein, 950 aa, Artificial Sequence
  Synthetic Polypeptide
MALPVTALLLPLALLLHAARPDIQMTQSPASLSVSVGETVTITCRASENIYSNLAWYQQKQGKSPQLLVYAATNLADGVPSRFSGSGSGTQYSLKINSLQSEDFGSYYCQHFWGTWTFGGGTTLEIKGGGGSGGGGSGGGGSEVQLQQSGPELVKPGASVKMSCKASGYTFTDYYMKWMKQSHGKSLEWIGDINPNNGGTTYNQKFKGKATLTVDKSSSTAYMQLNSLTSEDSAVYYCARDYGYGYFDYWGQGTTLTVSSTREQKLISEEDLAKPTTTPAPRPPTPAPTIASQPLSLRPEACRPAAGGAVHTRGLDFACDIYIWAPLAGTCGVLLLSLVITLYCKRGRKKLLYIFKQPFMRPVQTTQEEDGCSCRFPEEEEGGCELRVKFSRSADAPAYQQGQNQLYNELNLGRREEYDVLDKRRGRDPEMGGKPRRKNPQEGLYNELQKDKMAEAYSEIGMKGERRRGKGHDGLYQGLSTATKDTYDALHMQALPPRSRGSGATNFSLLKQAGDVEENPGPGIHMATYEVLCEVARKLGTDDREVVLFLLNVFIPQPTLAQLIGALRALKEEGRLTFPLLAECLFRAGRRDLLRDLLHLDPRFLERHLAGTMSYFSPYQLTVLHVDGELCARDIRSLIFLSKDTIGSRSTPQTFLHWVYCMENLDLLGPTDVDALMSMLRSLSRVDLQRQVQTLMGLHLSGPSHSQHYRHTPLETDFYDYKDDDDKTSGSGEGRGSLLTCGDVEENPGPHMTEYKPTVRLATRDDVPRAVRTLAAAFADYPATRHTVDPDRHIERVTELQELFLTRVGLDIGKVWVADDGAAVAVWTTPESVEAGAVFAEIGPRMAELSGSRLAAQQQMEGLLAPHRPKEPAWFLATVGVSPDHQGKGLGSAVVLPGVEAAERAGVPAFLETSAPRNLPFYERLGFTVTADVEVPEGPRTWCMTRKPGA

SEQ ID NO: 3028 - protein, 953 aa, Artificial Sequence
  Synthetic Polypeptide
MALPVTALLLPLALLLHAARPEIVLTQSPGTLSLSPGERATLSCRASQSVGGYLAWYQQKPGQAPRLLIYDASNRATGIPARFSGSGSGTDFTLTISSLEPEDFAVYYCQQRNNWPPMYTFGQGTKLEIKRGGGGSGGGGSGGGGSQVQLVQSGAEVKKPGSSVKVSCKASGGTFSSYAISWVRQAPGQGLEWMGGIIPILGTANYAQKFQGRVTITADESTSTAYMELSSLRSEDTAVYYCARWGGGAFDIWGQGTMVTVSSTREQKLISEEDLAKPTTTPAPRPPTPAPTIASQPLSLRPEACRPAAGGAVHTRGLDFACDIYIWAPLAGTCGVLLLSLVITLYCKRGRKKLLYIFKQPFMRPVQTTQEEDGCSCRFPEEEEGGCELRVKFSRSADAPAYQQGQNQLYNELNLGRREEYDVLDKRRGRDPEMGGKPRRKNPQEGLYNELQKDKMAEAYSEIGMKGERRRGKGHDGLYQGLSTATKDTYDALHMQALPPRSRGSGATNFSLLKQAGDVEENPGPGIHMATYEVLCEVARKLGTDDREVVLFLLNVFIPQPTLAQLIGALRALKEEGRLTFPLLAECLFRAGRRDLLRDLLHLDPRFLERHLAGTMSYFSPYQLTVLHVDGELCARDIRSLIFLSKDTIGSRSTPQTFLHWVYCMENLDLLGPTDVDALMSMLRSLSRVDLQRQVQTLMGLHLSGPSHSQHYRHTPLETDFYDYKDDDDKTSGSGEGRGSLLTCGDVEENPGPHMTEYKPTVRLATRDDVPRAVRTLAAAFADYPATRHTVDPDRHIERVTELQELFLTRVGLDIGKVWVADDGAAVAVWTTPESVEAGAVFAEIGPRMAELSGSRLAAQQQMEGLLAPHRPKEPAWFLATVGVSPDHQGKGLGSAVVLPGVEAAERAGVPAFLETSAPRNLPFYERLGFTVTADVEVPEGPRTWCMTRKPGA

SEQ ID NO: 3029 - protein, 948 aa, Artificial Sequence
  Synthetic Polypeptide
MALPVTALLLPLALLLHAARPQIVLTQSPALMSASPGEKVTMTCSASSSVRYMYWYQQKPRSSPKPWIHLTSNLASGVPARFSGSGSGTSYSLTISSMEAEDAATYYCQQWSSHPFTFGSGTKLEIKGGGGSGGGGSGGGGSDVQLQESGPGLVKPSQSLSLTCTVTGFSITSDYSWNWIRQFPGNKLEWMGYISYSGHTSYNPSLESRISITRDTSKNQFFLQLNSVTTEDTATYYCTRGNWDVVYWGQGTLVTVSATREQKLISEEDLAKPTTTPAPRPPTPAPTIASQPLSLRPEACRPAAGGAVHTRGLDFACDIYIWAPLAGTCGVLLLSLVITLYCKRGRKKLLYIFKQPFMRPVQTTQEEDGCSCRFPEEEEGGCELRVKFSRSADAPAYQQGQNQLYNELNLGRREEYDVLDKRRGRDPEMGGKPRRKNPQEGLYNELQKDKMAEAYSEIGMKGERRRGKGHDGLYQGLSTATKDTYDALHMQALPPRSRGSGATNFSLLKQAGDVEENPGPGIHMATYEVLCEVARKLGTDDREVVLFLLNVFIPQPTLAQLIGALRALKEEGRLTFPLLAECLFRAGRRDLLRDLLHLDPRFLERHLAGTMSYFSPYQLTVLHVDGELCARDIRSLIFLSKDTIGSRSTPQTFLHWVYCMENLDLLGPTDVDALMSMLRSLSRVDLQRQVQTLMGLHLSGPSHSQHYRHTPLETDFYDYKDDDDKTSGSGEGRGSLLTCGDVEENPGPHMTEYKPTVRLATRDDVPRAVRTLAAAFADYPATRHTVDPDRHIERVTELQELFLTRVGLDIGKVWVADDGAAVAVWTTPESVEAGAVFAEIGPRMAELSGSRLAAQQQMEGLLAPHRPKEPAWFLATVGVSPDHQGKGLGSAVVLPGVEAAERAGVPAFLETSAPRNLPFYERLGFTVTADVEVPEGPRTWCMTRKPGA

SEQ ID NO: 3030 - protein, 958 aa, Artificial Sequence
  Synthetic Polypeptide
MALPVTALLLPLALLLHAARPDVVMTQSPLSLPVTLGQPASISCRSSQSIVHSDGNTYLEWYQQRPGQSPRRLIYKVSNRFSGVPDRFSGSGSGTDFTLKISRVEAEDVGVYYCFQGSHAPWTFGGGTKVEIKGGGGSGGGGSGGGGSEVQLVESGGGLVQPGGSLRLSCAASGFTFSSYGMHWVRQAPGKGLEWVAYITTRSSTIYYADSVKGRFTISRDNAKNSLYLQMNSLRAEDTAVYYCTREPLTGYYAMDYWGQGTSVTVSSTREQKLISEEDLAKPTTTPAPRPPTPAPTIASQPLSLRPEACRPAAGGAVHTRGLDFACDIYIWAPLAGTCGVLLLSLVITLYCKRGRKKLLYIFKQPFMRPVQTTQEEDGCSCRFPEEEEGGCELRVKFSRSADAPAYQQGQNQLYNELNLGRREEYDVLDKRRGRDPEMGGKPRRKNPQEGLYNELQKDKMAEAYSEIGMKGERRRGKGHDGLYQGLSTATKDTYDALHMQALPPRSRGSGATNFSLLKQAGDVEENPGPGIHMATYEVLCEVARKLGTDDREVVLFLLNVFIPQPTLAQLIGALRALKEEGRLTFPLLAECLFRAGRRDLLRDLLHLDPRFLERHLAGTMSYFSPYQLTVLHVDGELCARDIRSLIFLSKDTIGSRSTPQTFLHWVYCMENLDLLGPTDVDALMSMLRSLSRVDLQRQVQTLMGLHLSGPSHSQHYRHTPLETDFYDYKDDDDKTSGSGEGRGSLLTCGDVEENPGPHMTEYKPTVRLATRDDVPRAVRTLAAAFADYPATRHTVDPDRHIERVTELQELFLTRVGLDIGKVWVADDGAAVAVWTTPESVEAGAVFAEIGPRMAELSGSRLAAQQQMEGLLAPHRPKEPAWFLATVGVSPDHQGKGLGSAVVLPGVEAAERAGVPAFLETSAPRNLPFYERLGFTVTADVEVPEGPRTWCMTRKPGA

SEQ ID NO: 3031 - protein, 950 aa, Artificial Sequence
  Synthetic Polypeptide
MALPVTALLLPLALLLHAARPDIQMTQSPSSLSASVGDRVTITCRASQSISLWLNWYQQKPGKAPKLLIYAASTLQSGVPSRFSGSGSGTDFTLTISSLQPEDFATYYCQQYYTSPYTFGQGTKVEIKRGGGGSGGGGSGGGGSQVQLLESGGGLVQPGGSLRLSCAASGFTFSSYAMSWVRQAPGKGLEWVSVIRSSGSSTYYADSVKGRFTISRDNSKNTLYLQMNSLRAEDTAVYYCARGGGYFDYWGQGTLVTVSSTREQKLISEEDLAKPTTTPAPRPPTPAPTIASQPLSLRPEACRPAAGGAVHTRGLDFACDIYIWAPLAGTCGVLLLSLVITLYCKRGRKKLLYIFKQPFMRPVQTTQEEDGCSCRFPEEEEGGCELRVKFSRSADAPAYQQGQNQLYNELNLGRREEYDVLDKRRGRDPEMGGKPRRKNPQEGLYNELQKDKMAEAYSEIGMKGERRRGKGHDGLYQGLSTATKDTYDALHMQALPPRSRGSGATNFSLLKQAGDVEENPGPGIHMATYEVLCEVARKLGTDDREVVLFLLNVFIPQPTLAQLIGALRALKEEGRLTFPLLAECLFRAGRRDLLRDLLHLDPRFLERHLAGTMSYFSPYQLTVLHVDGELCARDIRSLIFLSKDTIGSRSTPQTFLHWVYCMENLDLLGPTDVDALMSMLRSLSRVDLQRQVQTLMGLHLSGPSHSQHYRHTPLETDFYDYKDDDDKTSGSGEGRGSLLTCGDVEENPGPHMTEYKPTVRLATRDDVPRAVRTLAAAFADYPATRHTVDPDRHIERVTELQELFLTRVGLDIGKVWVADDGAAVAVWTTPESVEAGAVFAEIGPRMAELSGSRLAAQQQMEGLLAPHRPKEPAWFLATVGVSPDHQGKGLGSAVVLPGVEAAERAGVPAFLETSAPRNLPFYERLGFTVTADVEVPEGPRTWCMTRKPGA

SEQ ID NO: 3032 - protein, 953 aa, Artificial Sequence
  Synthetic Polypeptide
MALPVTALLLPLALLLHAARPDIQMTQSPSSLSASVGDRVTITCRASQSISSYLNWYQQKPGKAPKLLIYAVSTLQSGVPSRFSGSGSGTDFTLTISSLQPEDFATYYCQQSGTFPPTTFGQGTKVEIKRGGGGSGGGGSGGGGSQVQLLESGGGLVQPGGSLRLSCAASGFTFSSHGMHWVRQAPGKGLEWVSVISGSGSNTGYADSVKGRFTISRDNSKNTLYLQMNSLRAEDTAVYYCARQWGSYAFDSWGQGTLVTVSSTREQKLISEEDLAKPTTTPAPRPPTPAPTIASQPLSLRPEACRPAAGGAVHTRGLDFACDIYIWAPLAGTCGVLLLSLVITLYCKRGRKKLLYIFKQPFMRPVQTTQEEDGCSCRFPEEEEGGCELRVKFSRSADAPAYQQGQNQLYNELNLGRREEYDVLDKRRGRDPEMGGKPRRKNPQEGLYNELQKDKMAEAYSEIGMKGERRRGKGHDGLYQGLSTATKDTYDALHMQALPPRSRGSGATNFSLLKQAGDVEENPGPGIHMATYEVLCEVARKLGTDDREVVLFLLNVFIPQPTLAQLIGALRALKEEGRLTFPLLAECLFRAGRRDLLRDLLHLDPRFLERHLAGTMSYFSPYQLTVLHVDGELCARDIRSLIFLSKDTIGSRSTPQTFLHWVYCMENLDLLGPTDVDALMSMLRSLSRVDLQRQVQTLMGLHLSGPSHSQHYRHTPLETDFYDYKDDDDKTSGSGEGRGSLLTCGDVEENPGPHMTEYKPTVRLATRDDVPRAVRTLAAAFADYPATRHTVDPDRHIERVTELQELFLTRVGLDIGKVWVADDGAAVAVWTTPESVEAGAVFAEIGPRMAELSGSRLAAQQQMEGLLAPHRPKEPAWFLATVGVSPDHQGKGLGSAVVLPGVEAAERAGVPAFLETSAPRNLPFYERLGFTVTADVEVPEGPRTWCMTRKPGA

SEQ ID NO: 3033 - protein, 963 aa, Artificial Sequence
  Synthetic Polypeptide
MALPVTALLLPLALLLHAARPDIVMSQSPSSLAVSVGEKVTMSCKSSQSLLHSSNQKNYLAWYQQKPGQSPKVLIYWASTRESGVPDRFTGSGSGTDFTLTITSVKSEDLAVYYCQQYYSYPWTFGGGTRLEIKRGGGGSGGGGSGGGGSEVQLQQSVAELVKPGASVKMSCKVSGYTLTDHTIHWMKQRPEQGLEWIGYIYPRDGITGYNEKFKGKATLTADTSSSTAYMQLNSLTSEDSAVYFCARWGYSYRNYAYYYDYWGQGTTLTVSSTREQKLISEEDLAKPTTTPAPRPPTPAPTIASQPLSLRPEACRPAAGGAVHTRGLDFACDIYIWAPLAGTCGVLLLSLVITLYCKRGRKKLLYIFKQPFMRPVQTTQEEDGCSCRFPEEEEGGCELRVKFSRSADAPAYQQGQNQLYNELNLGRREEYDVLDKRRGRDPEMGGKPRRKNPQEGLYNELQKDKMAEAYSEIGMKGERRRGKGHDGLYQGLSTATKDTYDALHMQALPPRSRGSGATNFSLLKQAGDVEENPGPGIHMATYEVLCEVARKLGTDDREVVLFLLNVFIPQPTLAQLIGALRALKEEGRLTFPLLAECLFRAGRRDLLRDLLHLDPRFLERHLAGTMSYFSPYQLTVLHVDGELCARDIRSLIFLSKDTIGSRSTPQTFLHWVYCMENLDLLGPTDVDALMSMLRSLSRVDLQRQVQTLMGLHLSGPSHSQHYRHTPLETDFYDYKDDDDKTSGSGEGRGSLLTCGDVEENPGPHMTEYKPTVRLATRDDVPRAVRTLAAAFADYPATRHTVDPDRHIERVTELQELFLTRVGLDIGKVWVADDGAAVAVWTTPESVEAGAVFAEIGPRMAELSGSRLAAQQQMEGLLAPHRPKEPAWFLATVGVSPDHQGKGLGSAVVLPGVEAAERAGVPAFLETSAPRNLPFYERLGFTVTADVEVPEGPRTWCMTRKPGA

SEQ ID NO: 3034 - protein, 960 aa, Artificial Sequence
  Synthetic Polypeptide
MALPVTALLLPLALLLHAARPEIVLTQSPGTLSLSPGERATLSCRASQSVSSSYLAWYQQKPGQAPRLLIYGTSSRATGIPDRFSGSGSGTDFTLTISRLEPEDFAVYYCQQYGSSPFTFGGGTKVEIKRGGGGSGGGGSGGGGSQVQLQESGPGLAKPSETLSLTCTVSGDSITSYYWSWIRQPPGKGLEWIGYIYYSGSTNYNPSLKSRVTISVDTSKNQFSLKLSSVTAADTAVYYCARDQRRIAAAGTHFYGMDVWGQGTTVTVSSTREQKLISEEDLAKPTTTPAPRPPTPAPTIASQPLSLRPEACRPAAGGAVHTRGLDFACDIYIWAPLAGTCGVLLLSLVITLYCKRGRKKLLYIFKQPFMRPVQTTQEEDGCSCRFPEEEEGGCELRVKFSRSADAPAYQQGQNQLYNELNLGRREEYDVLDKRRGRDPEMGGKPRRKNPQEGLYNELQKDKMAEAYSEIGMKGERRRGKGHDGLYQGLSTATKDTYDALHMQALPPRSRGSGATNFSLLKQAGDVEENPGPGIHMATYEVLCEVARKLGTDDREVVLFLLNVFIPQPTLAQLIGALRALKEEGRLTFPLLAECLFRAGRRDLLRDLLHLDPRFLERHLAGTMSYFSPYQLTVLHVDGELCARDIRSLIFLSKDTIGSRSTPQTFLHWVYCMENLDLLGPTDVDALMSMLRSLSRVDLQRQVQTLMGLHLSGPSHSQHYRHTPLETDFYDYKDDDDKTSGSGEGRGSLLTCGDVEENPGPHMTEYKPTVRLATRDDVPRAVRTLAAAFADYPATRHTVDPDRHIERVTELQELFLTRVGLDIGKVWVADDGAAVAVWTTPESVEAGAVFAEIGPRMAELSGSRLAAQQQMEGLLAPHRPKEPAWFLATVGVSPDHQGKGLGSAVVLPGVEAAERAGVPAFLETSAPRNLPFYERLGFTVTADVEVPEGPRTWCMTRKPGA

SEQ ID NO: 3035 - protein, 952 aa, Artificial Sequence
  Synthetic Polypeptide
MALPVTALLLPLALLLHAARPDILLTQSPVILSVSPGERVSFSCRASQSIGTNIHWYQQRTNGSPRLLIKYASESISGIPSRFSGSGSGTDFTLSINSVESEDIADYYCQQNNNWPTTFGAGTKLELKGGGGSGGGGSGGGGSQVQLKQSGPGLVQPSQSLSITCTVSGFSLTNYGVHWVRQSPGKGLEWLGVIWSGGNTDYNTPFTSRLSINKDNSKSQVFFKMNSLQSNDTAIYYCARALTYYDYEFAYWGQGTLVTVSATREQKLISEEDLAKPTTTPAPRPPTPAPTIASQPLSLRPEACRPAAGGAVHTRGLDFACDIYIWAPLAGTCGVLLLSLVITLYCKRGRKKLLYIFKQPFMRPVQTTQEEDGCSCRFPEEEEGGCELRVKFSRSADAPAYQQGQNQLYNELNLGRREEYDVLDKRRGRDPEMGGKPRRKNPQEGLYNELQKDKMAEAYSEIGMKGERRRGKGHDGLYQGLSTATKDTYDALHMQALPPRSRGSGATNFSLLKQAGDVEENPGPGIHMATYEVLCEVARKLGTDDREVVLFLLNVFIPQPTLAQLIGALRALKEEGRLTFPLLAECLFRAGRRDLLRDLLHLDPRFLERHLAGTMSYFSPYQLTVLHVDGELCARDIRSLIFLSKDTIGSRSTPQTFLHWVYCMENLDLLGPTDVDALMSMLRSLSRVDLQRQVQTLMGLHLSGPSHSQHYRHTPLETDFYDYKDDDDKTSGSGEGRGSLLTCGDVEENPGPHMTEYKPTVRLATRDDVPRAVRTLAAAFADYPATRHTVDPDRHIERVTELQELFLTRVGLDIGKVWVADDGAAVAVWTTPESVEAGAVFAEIGPRMAELSGSRLAAQQQMEGLLAPHRPKEPAWFLATVGVSPDHQGKGLGSAVVLPGVEAAERAGVPAFLETSAPRNLPFYERLGFTVTADVEVPEGPRTWCMTRKPGA

SEQ ID NO: 3036 - protein, 945 aa, Artificial Sequence
  Synthetic Polypeptide
MALPVTALLLPLALLLHAARPMTQSPKFLLVSAGDRVTLTCKASQSVNNDVYWYQQEPGQSPKLLIYWASTRESGVPDRFTGSGSGTDFTLTISSVQAEDLAVYYCKQSYNLYTFGGGTKLEIKRGGGGSGGGGSGGGGSESGRGLVQPGGSRKLSCAASGFTFSTSGMHWVRQAPEKGLEWVAYISSGSTTIYHADTVKGRFTISRDNPKNTLFLQMTSLRSEDTAMYYCCARSGQFGNYFDYWGQGTTLTVSSTREQKLISEEDLAKPTTTPAPRPPTPAPTIASQPLSLRPEACRPAAGGAVHTRGLDFACDIYIWAPLAGTCGVLLLSLVITLYCKRGRKKLLYIFKQPFMRPVQTTQEEDGCSCRFPEEEEGGCELRVKFSRSADAPAYQQGQNQLYNELNLGRREEYDVLDKRRGRDPEMGGKPRRKNPQEGLYNELQKDKMAEAYSEIGMKGERRRGKGHDGLYQGLSTATKDTYDALHMQALPPRSRGSGATNFSLLKQAGDVEENPGPGIHMATYEVLCEVARKLGTDDREVVLFLLNVFIPQPTLAQLIGALRALKEEGRLTFPLLAECLFRAGRRDLLRDLLHLDPRFLERHLAGTMSYFSPYQLTVLHVDGELCARDIRSLIFLSKDTIGSRSTPQTFLHWVYCMENLDLLGPTDVDALMSMLRSLSRVDLQRQVQTLMGLHLSGPSHSQHYRHTPLETDFYDYKDDDDKTSGSGEGRGSLLTCGDVEENPGPHMTEYKPTVRLATRDDVPRAVRTLAAAFADYPATRHTVDPDRHIERVTELQELFLTRVGLDIGKVWVADDGAAVAVWTTPESVEAGAVFAEIGPRMAELSGSRLAAQQQMEGLLAPHRPKEPAWFLATVGVSPDHQGKGLGSAVVLPGVEAAERAGVPAFLETSAPRNLPFYERLGFTVTADVEVPEGPRTWCMTRKPGA

SEQ ID NO: 3037 - protein, 950 aa, Artificial Sequence
  Synthetic Polypeptide
MALPVTALLLPLALLLHAARPQSPSSLAVSAGEKVTMSCKSSQSLLNSRTRKNYLAWYQQKPGQSPKLLIYWASTRESGVPDRFTGSGSGTDFTLTISSVQAEDLAVYYCKQSNLYTFGGGTKLEIKGGGGSGGGGSGGGGSQVQLEESGPELVKPGASVKLSCKASGYTFTEYIIHWVKQRSGQGLEWIGWFYPGSGSIKYNEKFKDKATLTADKSSSTVYMELSGLTSEDSAVYFCARHDGYSYFDYWGQGTTLTVSSTREQKLISEEDLAKPTTTPAPRPPTPAPTIASQPLSLRPEACRPAAGGAVHTRGLDFACDIYIWAPLAGTCGVLLLSLVITLYCKRGRKKLLYIFKQPFMRPVQTTQEEDGCSCRFPEEEEGGCELRVKFSRSADAPAYQQGQNQLYNELNLGRREEYDVLDKRRGRDPEMGGKPRRKNPQEGLYNELQKDKMAEAYSEIGMKGERRRGKGHDGLYQGLSTATKDTYDALHMQALPPRSRGSGATNFSLLKQAGDVEENPGPGIHMATYEVLCEVARKLGTDDREVVLFLLNVFIPQPTLAQLIGALRALKEEGRLTFPLLAECLFRAGRRDLLRDLLHLDPRFLERHLAGTMSYFSPYQLTVLHVDGELCARDIRSLIFLSKDTIGSRSTPQTFLHWVYCMENLDLLGPTDVDALMSMLRSLSRVDLQRQVQTLMGLHLSGPSHSQHYRHTPLETDFYDYKDDDDKTSGSGEGRGSLLTCGDVEENPGPHMTEYKPTVRLATRDDVPRAVRTLAAAFADYPATRHTVDPDRHIERVTELQELFLTRVGLDIGKVWVADDGAAVAVWTTPESVEAGAVFAEIGPRMAELSGSRLAAQQQMEGLLAPHRPKEPAWFLATVGVSPDHQGKGLGSAVVLPGVEAAERAGVPAFLETSAPRNLPFYERLGFTVTADVEVPEGPRTWCMTRKPGA

SEQ ID NO: 3038 - protein, 962 aa, Artificial Sequence
  Synthetic Polypeptide
MEMFQGLLLLLLLSMGGTWASREMLRPRCRPINATLAVEKEGCPVCITVNTTICAGYCPTMTRVLQGVLPALPQVVCNYRDVRFESIRLPGCPRGVNPVVSYAVALSCQCALCRRSTTDCGGPKDHPLTCDDPRFQASSSSKAPPPSLPSPSRLPGPSDTPILPQGGGGSGGGGSGGGGSAPDVQDCPECTLQENPFFSQPGAPILQCMGCCFSRAYPTPLRSKKTMLVQKNVTSESTCCVAKSYNRVTVMGGFKVENHTACHCSTCYYHKSTREQKLISEEDLAKPTTTPAPRPPTPAPTIASQPLSLRPEACRPAAGGAVHTRGLDFACDIYIWAPLAGTCGVLLLSLVITLYCKRGRKKLLYIFKQPFMRPVQTTQEEDGCSCRFPEEEEGGCELRVKFSRSADAPAYQQGQNQLYNELNLGRREEYDVLDKRRGRDPEMGGKPRRKNPQEGLYNELQKDKMAEAYSEIGMKGERRRGKGHDGLYQGLSTATKDTYDALHMQALPPRSRGSGATNFSLLKQAGDVEENPGPGIHMATYEVLCEVARKLGTDDREVVLFLLNVFIPQPTLAQLIGALRALKEEGRLTFPLLAECLFRAGRRDLLRDLLHLDPRFLERHLAGTMSYFSPYQLTVLHVDGELCARDIRSLIFLSKDTIGSRSTPQTFLHWVYCMENLDLLGPTDVDALMSMLRSLSRVDLQRQVQTLMGLHLSGPSHSQHYRHTPLETDFYDYKDDDDKTSGSGEGRGSLLTCGDVEENPGPHMTEYKPTVRLATRDDVPRAVRTLAAAFADYPATRHTVDPDRHIERVTELQELFLTRVGLDIGKVWVADDGAAVAVWTTPESVEAGAVFAEIGPRMAELSGSRLAAQQQMEGLLAPHRPKEPAWFLATVGVSPDHQGKGLGSAVVLPGVEAAERAGVPAFLETSAPRNLPFYERLGFTVTADVEVPEGPRTWCMTRKPGA

SEQ ID NO: 3039 - protein, 953 aa, Artificial Sequence
  Synthetic Polypeptide
MALPVTALLLPLALLLHAARPDIQMTQSPSSLSASLGERVSLTCRATQELSGYLSWLQQKPDGTIKRLIYAASTLDSGVPKRFSGNRSGSDYSLTISSLESEDFADYYCLQYAIYPYTFGGGTKLEIKGGGGSGGGGSGGGGSEVQLQQSGPELVKPGASVKMSCKASGYTFTSYFIHWVKQKPGQGLEWIGFINPYNDGSKYNEKFKGKATLTSDKSSSTAYMELSSLTSEDSAVYYCTRDDGYYGYAMDYWGQGTSVTVSSTREQKLISEEDLAKPTTTPAPRPPTPAPTIASQPLSLRPEACRPAAGGAVHTRGLDFACDIYIWAPLAGTCGVLLLSLVITLYCKRGRKKLLYIFKQPFMRPVQTTQEEDGCSCRFPEEEEGGCELRVKFSRSADAPAYQQGQNQLYNELNLGRREEYDVLDKRRGRDPEMGGKPRRKNPQEGLYNELQKDKMAEAYSEIGMKGERRRGKGHDGLYQGLSTATKDTYDALHMQALPPRSRGSGATNFSLLKQAGDVEENPGPGIHMATYEVLCEVARKLGTDDREVVLFLLNVFIPQPTLAQLIGALRALKEEGRLTFPLLAECLFRAGRRDLLRDLLHLDPRFLERHLAGTMSYFSPYQLTVLHVDGELCARDIRSLIFLSKDTIGSRSTPQTFLHWVYCMENLDLLGPTDVDALMSMLRSLSRVDLQRQVQTLMGLHLSGPSHSQHYRHTPLETDFYDYKDDDDKTSGSGEGRGSLLTCGDVEENPGPHMTEYKPTVRLATRDDVPRAVRTLAAAFADYPATRHTVDPDRHIERVTELQELFLTRVGLDIGKVWVADDGAAVAVWTTPESVEAGAVFAEIGPRMAELSGSRLAAQQQMEGLLAPHRPKEPAWFLATVGVSPDHQGKGLGSAVVLPGVEAAERAGVPAFLETSAPRNLPFYERLGFTVTADVEVPEGPRTWCMTRKPGA

SEQ ID NO: 3040 - protein, 958 aa, Artificial Sequence
  Synthetic Polypeptide
MALPVTALLLPLALLLHAARPDTIVLTQSPASLAVSLGQRATISCRASESVDSYGNSFMHWYQQKPGQPPKLLIYLASNLESGVPARFSGSGSRTDFTLTIDPVEADDAATYYCQQNNYDPWTFGGGTKLEIKGGGGSGGGGSGGGGSEVQLQQSGPELVKPGASVKMSCKASGYTFTSYVMHWVKQKPGQGLEWIGYINPYNDGTKYNEKFKGKATLTSDTSSSTAYMELNSLTSEDSAVYFCARPIYFDNDYFDYWGQGTTLKVSSTREQKLISEEDLAKPTTTPAPRPPTPAPTIASQPLSLRPEACRPAAGGAVHTRGLDFACDIYIWAPLAGTCGVLLLSLVITLYCKRGRKKLLYIFKQPFMRPVQTTQEEDGCSCRFPEEEEGGCELRVKFSRSADAPAYQQGQNQLYNELNLGRREEYDVLDKRRGRDPEMGGKPRRKNPQEGLYNELQKDKMAEAYSEIGMKGERRRGKGHDGLYQGLSTATKDTYDALHMQALPPRSRGSGATNFSLLKQAGDVEENPGPGIHMATYEVLCEVARKLGTDDREVVLFLLNVFIPQPTLAQLIGALRALKEEGRLTFPLLAECLFRAGRRDLLRDLLHLDPRFLERHLAGTMSYFSPYQLTVLHVDGELCARDIRSLIFLSKDTIGSRSTPQTFLHWVYCMENLDLLGPTDVDALMSMLRSLSRVDLQRQVQTLMGLHLSGPSHSQHYRHTPLETDFYDYKDDDDKTSGSGEGRGSLLTCGDVEENPGPHMTEYKPTVRLATRDDVPRAVRTLAAAFADYPATRHTVDPDRHIERVTELQELFLTRVGLDIGKVWVADDGAAVAVWTTPESVEAGAVFAEIGPRMAELSGSRLAAQQQMEGLLAPHRPKEPAWFLATVGVSPDHQGKGLGSAVVLPGVEAAERAGVPAFLETSAPRNLPFYERLGFTVTADVEVPEGPRTWCMTRKPGA

SEQ ID NO: 3041 - protein, 953 aa, Artificial Sequence
  Synthetic Polypeptide
MALPVTALLLPLALLLHAARPDIQMTQSPSSLSASVGDRVTITCKASQDVSTAVAWFQQKPGKAPKLLIYSPSYRYTGVPSRFSGSGSGTDFTLTISSLQPEDFTYYCQQLYSTPYTFGQGTKVEIKGGGGSGGGGSGGGGSEVQLVQSGAEVKKPGASVKVSCKASGYTFTDYYLDVVVRQAPGQGLEWIGRVNPYNGGTIYNQKFKGRVTLTRDTSTSTAYLELSSLRSEDTAVYYCARDHYRYDPLLDYWGQGTLVTVSSTREQKLISEEDLAKPTTTPAPRPPTPAPTIASQPLSLRPEACRPAAGGAVHTRGLDFACDIYIWAPLAGTCGVLLLSLVITLYCKRGRKKLLYIFKQPFMRPVQTTQEEDGCSCRFPEEEEGGCELRVKFSRSADAPAYQQGQNQLYNELNLGRREEYDVLDKRRGRDPEMGGKPRRKNPQEGLYNELQKDKMAEAYSEIGMKGERRRGKGHDGLYQGLSTATKDTYDALHMQALPPRSRGSGATNFSLLKQAGDVEENPGPGIHMATYEVLCEVARKLGTDDREVVLFLLNVFIPQPTLAQLIGALRALKEEGRLTFPLLAECLFRAGRRDLLRDLLHLDPRFLERHLAGTMSYFSPYQLTVLHVDGELCARDIRSLIFLSKDTIGSRSTPQTFLHWVYCMENLDLLGPTDVDALMSMLRSLSRVDLQRQVQTLMGLHLSGPSHSQHYRHTPLETDFYDYKDDDDKTSGSGEGRGSLLTCGDVEENPGPHMTEYKPTVRLATRDDVPRAVRTLAAAFADYPATRHTVDPDRHIERVTELQELFLTRVGLDIGKVWVADDGAAVAVWTTPESVEAGAVFAEIGPRMAELSGSRLAAQQQMEGLLAPHRPKEPAWFLATVGVSPDHQGKGLGSAVVLPGVEAAERAGVPAFLETSAPRNLPFYERLGFTVTADVEVPEGPRTWCMTRKPGA

SEQ ID NO: 3042 - protein, 959 aa, Artificial Sequence
  Synthetic Polypeptide
MALPVTALLLPLALLLHAARPDIQMTQSPSSLSASVGDRVTITCRASQSVSTSSYNYMHWYQQKPGKPPKLLIKYASNLESGVPSRFSGSGSGTDFTLTISSLQPEDFATYYCQHSWEIPLTFGQGTKVEIKGGGGSGGGGSGGGGSEVQLVQSGAEVKKPGASVKVSCKASGYSFTDYYMHWVRQAPGQGLEWIGRINPYNGAAFYSQNFKDRVTLTVDTSTSTAYLELSSLRSEDTAVYYCAIERGADLEGYAMDYWGQGTLVTVSSTREQKLISEEDLAKPTTTPAPRPPTPAPTIASQPLSLRPEACRPAAGGAVHTRGLDFACDIYIWAPLAGTCGVLLLSLVITLYCKRGRKKLLYIFKQPFMRPVQTTQEEDGCSCRFPEEEEGGCELRVKFSRSADAPAYQQGQNQLYNELNLGRREEYDVLDKRRGRDPEMGGKPRRKNPQEGLYNELQKDKMAEAYSEIGMKGERRRGKGHDGLYQGLSTATKDTYDALHMQALPPRSRGSGATNFSLLKQAGDVEENPGPGIHMATYEVLCEVARKLGTDDREVVLFLLNVFIPQPTLAQLIGALRALKEEGRLTFPLLAECLFRAGRRDLLRDLLHLDPRFLERHLAGTMSYFSPYQLTVLHVDGELCARDIRSLIFLSKDTIGSRSTPQTFLHWVYCMENLDLLGPTDVDALMSMLRSLSRVDLQRQVQTLMGLHLSGPSHSQHYRHTPLETDFYDYKDDDDKTSGSGEGRGSLLTCGDVEENPGPHMTEYKPTVRLATRDDVPRAVRTLAAAFADYPATRHTVDPDRHIERVTELQELFLTRVGLDIGKVWVADDGAAVAVWTTPESVEAGAVFAEIGPRMAELSGSRLAAQQQMEGLLAPHRPKEPAWFLATVGVSPDHQGKGLGSAVVLPGVEAAERAGVPAFLETSAPRNLPFYERLGFTVTADVEVPEGPRTWCMTRKPGA

SEQ ID NO: 3043 - protein, 957 aa, Artificial Sequence
  Synthetic Polypeptide
MALPVTALLLPLALLLHAARPEIVLTQSPATLSASPGERVTLTCRASSNVISSYVHWYQQKPGSSPRLFLYSTSNLASGVPSRFSGSGSGTDFTFTISSLEAEDAATYYCQQYSGYPLTFGQGTRLEIKGGGGSGGGGSGGGGSQVQLQESGPGLVKPSETLSLTCAVSGYSITSAYYWNWIRQPPGKGLEWIGYISYDGRNNYNPSLKNRITINPDTSKNQFSLQLNSVTPEDTAVYYCAREGDYDVGNYYAMDYWGQGTLVTVSSTREQKLISEEDLAKPTTTPAPRPPTPAPTIASQPLSLRPEACRPAAGGAVHTRGLDFACDIYIWAPLAGTCGVLLLSLVITLYCKRGRKKLLYIFKQPFMRPVQTTQEEDGCSCRFPEEEEGGCELRVKFSRSADAPAYQQGQNQLYNELNLGRREEYDVLDKRRGRDPEMGGKPRRKNPQEGLYNELQKDKMAEAYSEIGMKGERRRGKGHDGLYQGLSTATKDTYDALHMQALPPRSRGSGATNFSLLKQAGDVEENPGPGIHMATYEVLCEVARKLGTDDREVVLFLLNVFIPQPTLAQLIGALRALKEEGRLTFPLLAECLFRAGRRDLLRDLLHLDPRFLERHLAGTMSYFSPYQLTVLHVDGELCARDIRSLIFLSKDTIGSRSTPQTFLHWVYCMENLDLLGPTDVDALMSMLRSLSRVDLQRQVQTLMGLHLSGPSHSQHYRHTPLETDFYDYKDDDDKTSGSGEGRGSLLTCGDVEENPGPHMTEYKPTVRLATRDDVPRAVRTLAAAFADYPATRHTVDPDRHIERVTELQELFLTRVGLDIGKVWVADDGAAVAVWTTPESVEAGAVFAEIGPRMAELSGSRLAAQQQMEGLLAPHRPKEPAWFLATVGVSPDHQGKGLGSAVVLPGVEAAERAGVPAFLETSAPRNLPFYERLGFTVTADVEVPEGPRTWCMTRKPGA

SEQ ID NO: 3044 - protein, 957 aa, Artificial Sequence
  Synthetic Polypeptide
MALPVTALLLPLALLLHAARPEIVLTQSPATLSLSPGERATLSCRASSNVISSYVHWYQQKPGQAPRLLIYSTSNLASGIPARFSGSGSGTDFTLTISSLEPEDFAVYYCQQYSGYPLTFGQGTRLEIKGGGGSGGGGSGGGGSEVQLVESGGGLVQPGRSLRLSCAASGYSITSAYYWNWVRQAPGKGLEWVSYISYDGRNNYNPSLKNRFTISRDNAKKSLYLQMNSLRAEDTALYYCAKEGDYDVGNYYAMDYWGQGTTVTVSSTREQKLISEEDLAKPTTTPAPRPPTPAPTIASQPLSLRPEACRPAAGGAVHTRGLDFACDIYIWAPLAGTCGVLLLSLVITLYCKRGRKKLLYIFKQPFMRPVQTTQEEDGCSCRFPEEEEGGCELRVKFSRSADAPAYQQGQNQLYNELNLGRREEYDVLDKRRGRDPEMGGKPRRKNPQEGLYNELQKDKMAEAYSEIGMKGERRRGKGHDGLYQGLSTATKDTYDALHMQALPPRSRGSGATNFSLLKQAGDVEENPGPGIHMATYEVLCEVARKLGTDDREVVLFLLNVFIPQPTLAQLIGALRALKEEGRLTFPLLAECLFRAGRRDLLRDLLHLDPRFLERHLAGTMSYFSPYQLTVLHVDGELCARDIRSLIFLSKDTIGSRSTPQTFLHWVYCMENLDLLGPTDVDALMSMLRSLSRVDLQRQVQTLMGLHLSGPSHSQHYRHTPLETDFYDYKDDDDKTSGSGEGRGSLLTCGDVEENPGPHMTEYKPTVRLATRDDVPRAVRTLAAAFADYPATRHTVDPDRHIERVTELQELFLTRVGLDIGKVWVADDGAAVAVWTTPESVEAGAVFAEIGPRMAELSGSRLAAQQQMEGLLAPHRPKEPAWFLATVGVSPDHQGKGLGSAVVLPGVEAAERAGVPAFLETSAPRNLPFYERLGFTVTADVEVPEGPRTWCMTRKPGA

SEQ ID NO: 3045 - protein, 969 aa, Artificial Sequence
  Synthetic Polypeptide
MALPVTALLLPLALLLHAARPDLNFMLTQPHSVSGSPGKTVTISCTRSTGSITSNYVHWYQQRPGSSPTTVICEDNERPSGVPDRFSGSIDISSNSASLTISGLKTEDEADYYCQSYDDSNHISVFGTGTKVTVLGQPKANPGGGGSGGGGSGGGGSQVQLQESGPGLVKPSETLSLTCTVSGGSISSSNYYWGWIRQPPGKGLEWIGAIYYSGSTYYNPSLKSRVAISVDTSKNQFSLKLSSVTAADTAVYYCARRIGVAGQWYFDLWGRGTLVTVSSTREQKLISEEDLAKPTTTPAPRPPTPAPTIASQPLSLRPEACRPAAGGAVHTRGLDFACDIYIWAPLAGTCGVLLLSLVITLYCKRGRKKLLYIFKQPFMRPVQTTQEEDGCSCRFPEEEEGGCELRVKFSRSADAPAYQQGQNQLYNELNLGRREEYDVLDKRRGRDPEMGGKPRRKNPQEGLYNELQKDKMAEAYSEIGMKGERRRGKGHDGLYQGLSTATKDTYDALHMQALPPRSRGSGATNFSLLKQAGDVEENPGPGIHMATYEVLCEVARKLGTDDREVVLFLLNVFIPQPTLAQLIGALRALKEEGRLTFPLLAECLFRAGRRDLLRDLLHLDPRFLERHLAGTMSYFSPYQLTVLHVDGELCARDIRSLIFLSKDTIGSRSTPQTFLHWVYCMENLDLLGPTDVDALMSMLRSLSRVDLQRQVQTLMGLHLSGPSHSQHYRHTPLETDFYDYKDDDDKTSGSGEGRGSLLTCGDVEENPGPHMTEYKPTVRLATRDDVPRAVRTLAAAFADYPATRHTVDPDRHIERVTELQELFLTRVGLDIGKVWVADDGAAVAVWTTPESVEAGAVFAEIGPRMAELSGSRLAAQQQMEGLLAPHRPKEPAWFLATVGVSPDHQGKGLGSAVVLPGVEAAERAGVPAFLETSAPRNLPFYERLGFTVTADVEVPEGPRTWCMTRKPGA

SEQ ID NO: 3046 - protein, 955 aa, Artificial Sequence
  Synthetic Polypeptide
MALPVTALLLPLALLLHAARPDIQMTQSPSSLSASVGDRVTITCKASQDVGIAVAWYQQKPGKVPKLLIYWASTRHTGVPDRFSGSGSGTDFTLTISSLQPEDVATYYCQQYSSYPYTFGQGTKVEIKGGGGSGGGGSGGGGSQIQLVQSGPDLKKPGETVKISCKASGYTFTNTGMNWVKQAPGKGLKWMGWINTYTGEPTYADDFKGRFTFSLETSASTAYLQINNLKNEDTATYFCTRWGYGSSLYYAMDYWGQGTSVTVSSTREQKLISEEDLAKPTTTPAPRPPTPAPTIASQPLSLRPEACRPAAGGAVHTRGLDFACDIYIWAPLAGTCGVLLLSLVITLYCKRGRKKLLYIFKQPFMRPVQTTQEEDGCSCRFPEEEEGGCELRVKFSRSADAPAYQQGQNQLYNELNLGRREEYDVLDKRRGRDPEMGGKPRRKNPQEGLYNELQKDKMAEAYSEIGMKGERRRGKGHDGLYQGLSTATKDTYDALHMQALPPRSRGSGATNFSLLKQAGDVEENPGPGIHMATYEVLCEVARKLGTDDREVVLFLLNVFIPQPTLAQLIGALRALKEEGRLTFPLLAECLFRAGRRDLLRDLLHLDPRFLERHLAGTMSYFSPYQLTVLHVDGELCARDIRSLIFLSKDTIGSRSTPQTFLHWVYCMENLDLLGPTDVDALMSMLRSLSRVDLQRQVQTLMGLHLSGPSHSQHYRHTPLETDFYDYKDDDDKTSGSGEGRGSLLTCGDVEENPGPHMTEYKPTVRLATRDDVPRAVRTLAAAFADYPATRHTVDPDRHIERVTELQELFLTRVGLDIGKVWVADDGAAVAVWTTPESVEAGAVFAEIGPRMAELSGSRLAAQQQMEGLLAPHRPKEPAWFLATVGVSPDHQGKGLGSAVVLPGVEAAERAGVPAFLETSAPRNLPFYERLGFTVTADVEVPEGPRTWCMTRKPGA

SEQ ID NO: 3047 - protein, 952 aa, Artificial Sequence
  Synthetic Polypeptide
MALPVTALLLPLALLLHAARPDIQMTQSPSSLSASVGDRVTITCKASQDVGIAVAWYQQKPGKVPKLLIYWASTRHTGVPDRFSGSGSGTDFTLTISSLQPEDVATYYCQQYSSYPYTFGQGTKVEIKGGGGSGGGGSGGGGSEVQLVESGGGLVQPGGSLRLSCAASGFDFSRYWMSWVRQAPGKGLEWIGEINPDSSTINYAPSLKDKFIISRDNAKNSLYLQMNSLRAEDTAVYYCARPDGNYWYFDVWGQGTLVTVSSTREQKLISEEDLAKPTTTPAPRPPTPAPTIASQPLSLRPEACRPAAGGAVHTRGLDFACDIYIWAPLAGTCGVLLLSLVITLYCKRGRKKLLYIFKQPFMRPVQTTQEEDGCSCRFPEEEEGGCELRVKFSRSADAPAYQQGQNQLYNELNLGRREEYDVLDKRRGRDPEMGGKPRRKNPQEGLYNELQKDKMAEAYSEIGMKGERRRGKGHDGLYQGLSTATKDTYDALHMQALPPRSRGSGATNFSLLKQAGDVEENPGPGIHMATYEVLCEVARKLGTDDREVVLFLLNVFIPQPTLAQLIGALRALKEEGRLTFPLLAECLFRAGRRDLLRDLLHLDPRFLERHLAGTMSYFSPYQLTVLHVDGELCARDIRSLIFLSKDTIGSRSTPQTFLHWVYCMENLDLLGPTDVDALMSMLRSLSRVDLQRQVQTLMGLHLSGPSHSQHYRHTPLETDFYDYKDDDDKTSGSGEGRGSLLTCGDVEENPGPHMTEYKPTVRLATRDDVPRAVRTLAAAFADYPATRHTVDPDRHIERVTELQELFLTRVGLDIGKVWVADDGAAVAVWTTPESVEAGAVFAEIGPRMAELSGSRLAAQQQMEGLLAPHRPKEPAWFLATVGVSPDHQGKGLGSAVVLPGVEAAERAGVPAFLETSAPRNLPFYERLGFTVTADVEVPEGPRTWCMTRKPGA

SEQ ID NO: 3048 - protein, 953 aa, Artificial Sequence
  Synthetic Polypeptide
MALPVTALLLPLALLLHAARPDIVMTQSQKSMSTSVGDRVSITCKASQDVITGVAWYQQKPGQSPKLLIYSASYRYTGVPDRFTGSGSGTDFTFTISNVQAEDLAVYYCQQHYSTPLTFGAGTKLELKGGGGSGGGGSGGGGSQVQLQQPGAELVRPGASVKLSCKASGYSFTTYWMNWVKQRPGQGLEWIGMIHPSDSETRLNQKFKDKATLTVDKSSSTAYMQLSSPTSEDSAVYYCARSTMIATRAMDYWGQGTSVTVSSTREQKLISEEDLAKPTTTPAPRPPTPAPTIASQPLSLRPEACRPAAGGAVHTRGLDFACDIYIWAPLAGTCGVLLLSLVITLYCKRGRKKLLYIFKQPFMRPVQTTQEEDGCSCRFPEEEEGGCELRVKFSRSADAPAYQQGQNQLYNELNLGRREEYDVLDKRRGRDPEMGGKPRRKNPQEGLYNELQKDKMAEAYSEIGMKGERRRGKGHDGLYQGLSTATKDTYDALHMQALPPRSRGSGATNFSLLKQAGDVEENPGPGIHMATYEVLCEVARKLGTDDREVVLFLLNVFIPQPTLAQLIGALRALKEEGRLTFPLLAECLFRAGRRDLLRDLLHLDPRFLERHLAGTMSYFSPYQLTVLHVDGELCARDIRSLIFLSKDTIGSRSTPQTFLHWVYCMENLDLLGPTDVDALMSMLRSLSRVDLQRQVQTLMGLHLSGPSHSQHYRHTPLETDFYDYKDDDDKTSGSGEGRGSLLTCGDVEENPGPHMTEYKPTVRLATRDDVPRAVRTLAAAFADYPATRHTVDPDRHIERVTELQELFLTRVGLDIGKVWVADDGAAVAVWTTPESVEAGAVFAEIGPRMAELSGSRLAAQQQMEGLLAPHRPKEPAWFLATVGVSPDHQGKGLGSAVVLPGVEAAERAGVPAFLETSAPRNLPFYERLGFTVTADVEVPEGPRTWCMTRKPGA

SEQ ID NO: 3049 - protein, 955 aa, Artificial Sequence
  Synthetic Polypeptide
MALPVTALLLPLALLLHAARPDIQMTQSPSSLSASVGDRVTITCKASQDVSTAVAWYQQKPGKAPKLLIYSASYRYTGVPDRFTGSGSGTDFTLTISSLQPEDFATYYCQQHYSTPPYTFGGGTKVEIKRGGGGSGGGGSGGGGSQVQLVQSGAEVKKPGASVKVSCKASGYAFSSSWMNWVRQAPGQGLEWIGRIYPGDGDTKYNGKFKGKATLTADKSTSTAYMELSSLRSEDTAVYYCARSTMIATGAMDYWGQGTLVTVSSTREQKLISEEDLAKPTTTPAPRPPTPAPTIASQPLSLRPEACRPAAGGAVHTRGLDFACDIYIWAPLAGTCGVLLLSLVITLYCKRGRKKLLYIFKQPFMRPVQTTQEEDGCSCRFPEEEEGGCELRVKFSRSADAPAYQQGQNQLYNELNLGRREEYDVLDKRRGRDPEMGGKPRRKNPQEGLYNELQKDKMAEAYSEIGMKGERRRGKGHDGLYQGLSTATKDTYDALHMQALPPRSRGSGATNFSLLKQAGDVEENPGPGIHMATYEVLCEVARKLGTDDREVVLFLLNVFIPQPTLAQLIGALRALKEEGRLTFPLLAECLFRAGRRDLLRDLLHLDPRFLERHLAGTMSYFSPYQLTVLHVDGELCARDIRSLIFLSKDTIGSRSTPQTFLHWVYCMENLDLLGPTDVDALMSMLRSLSRVDLQRQVQTLMGLHLSGPSHSQHYRHTPLETDFYDYKDDDDKTSGSGEGRGSLLTCGDVEENPGPHMTEYKPTVRLATRDDVPRAVRTLAAAFADYPATRHTVDPDRHIERVTELQELFLTRVGLDIGKVWVADDGAAVAVWTTPESVEAGAVFAEIGPRMAELSGSRLAAQQQMEGLLAPHRPKEPAWFLATVGVSPDHQGKGLGSAVVLPGVEAAERAGVPAFLETSAPRNLPFYERLGFTVTADVEVPEGPRTWCMTRKPGA

SEQ ID NO: 3050 - protein, 956 aa, Artificial Sequence
  Synthetic Polypeptide
MALPVTALLLPLALLLHAARPDVVMTQTPLSLSVTPGQPASISCRSSQSLVHNNGNTYLHWYLQKPGQSPQLLIYKVSNRFSGVPDRFSGSGSGTDFTLKISRVEAEDVGVYFCSQSTHVPPYTFGGGTKVEIKGGGGSGGGGSGGGGSEVQLVESGGGLVQPGGSLRLSCAASGFTFSDYYMAWVRQAPGKGLEWVAEINYDGSSTYYVDSVKGRFTISRDNAKNSLYLQMNSLRAEDTAVYYCARDRGFYFDYWGQGTTVTVSSTREQKLISEEDLAKPTTTPAPRPPTPAPTIASQPLSLRPEACRPAAGGAVHTRGLDFACDIYIWAPLAGTCGVLLLSLVITLYCKRGRKKLLYIFKQPFMRPVQTTQEEDGCSCRFPEEEEGGCELRVKFSRSADAPAYQQGQNQLYNELNLGRREEYDVLDKRRGRDPEMGGKPRRKNPQEGLYNELQKDKMAEAYSEIGMKGERRRGKGHDGLYQGLSTATKDTYDALHMQALPPRSRGSGATNFSLLKQAGDVEENPGPGIHMATYEVLCEVARKLGTDDREVVLFLLNVFIPQPTLAQLIGALRALKEEGRLTFPLLAECLFRAGRRDLLRDLLHLDPRFLERHLAGTMSYFSPYQLTVLHVDGELCARDIRSLIFLSKDTIGSRSTPQTFLHWVYCMENLDLLGPTDVDALMSMLRSLSRVDLQRQVQTLMGLHLSGPSHSQHYRHTPLETDFYDYKDDDDKTSGSGEGRGSLLTCGDVEENPGPHMTEYKPTVRLATRDDVPRAVRTLAAAFADYPATRHTVDPDRHIERVTELQELFLTRVGLDIGKVWVADDGAAVAVWTTPESVEAGAVFAEIGPRMAELSGSRLAAQQQMEGLLAPHRPKEPAWFLATVGVSPDHQGKGLGSAVVLPGVEAAERAGVPAFLETSAPRNLPFYERLGFTVTADVEVPEGPRTWCMTRKPGA

SEQ ID NO: 3051 - protein, 956 aa, Artificial Sequence
  Synthetic Polypeptide
MALPVTALLLPLALLLHAARPDVVMTQTPLSLSVTPGQPASISCRSSQSLVHSNGLTYLHWYLQKPGQSPQLLIYKVSNRFSGVPDRFSGSGSGTDFTLKISRVEAEDVGVYFCSQSTHVPPFTFGGGTKVEIKGGGGSGGGGSGGGGSEVQLVESGGGLVQPGGSLRLSCAASGFTFSDYYMAWVRQAPGKGLEWVASINYDGESTYYVDSVKGRFTISRDNAKNSLYLQMNSLRAEDTAVYYCARDRGYYFDYWGQGTTVTVSSTREQKLISEEDLAKPTTTPAPRPPTPAPTIASQPLSLRPEACRPAAGGAVHTRGLDFACDIYIWAPLAGTCGVLLLSLVITLYCKRGRKKLLYIFKQPFMRPVQTTQEEDGCSCRFPEEEEGGCELRVKFSRSADAPAYQQGQNQLYNELNLGRREEYDVLDKRRGRDPEMGGKPRRKNPQEGLYNELQKDKMAEAYSEIGMKGERRRGKGHDGLYQGLSTATKDTYDALHMQALPPRSRGSGATNFSLLKQAGDVEENPGPGIHMATYEVLCEVARKLGTDDREVVLFLLNVFIPQPTLAQLIGALRALKEEGRLTFPLLAECLFRAGRRDLLRDLLHLDPRFLERHLAGTMSYFSPYQLTVLHVDGELCARDIRSLIFLSKDTIGSRSTPQTFLHWVYCMENLDLLGPTDVDALMSMLRSLSRVDLQRQVQTLMGLHLSGPSHSQHYRHTPLETDFYDYKDDDDKTSGSGEGRGSLLTCGDVEENPGPHMTEYKPTVRLATRDDVPRAVRTLAAAFADYPATRHTVDPDRHIERVTELQELFLTRVGLDIGKVWVADDGAAVAVWTTPESVEAGAVFAEIGPRMAELSGSRLAAQQQMEGLLAPHRPKEPAWFLATVGVSPDHQGKGLGSAVVLPGVEAAERAGVPAFLETSAPRNLPFYERLGFTVTADVEVPEGPRTWCMTRKPGA

SEQ ID NO: 3052 - protein, 956 aa, Artificial Sequence
  Synthetic Polypeptide
MALPVTALLLPLALLLHAARPDVVMTQSPLSLPVTPGEPASISCRSSQSLVHSNGNTYLHWYLQKPGQSPQLLIYKVSNRFSGVPDRFSGSGSGTDFTLKISRVEAEDVGVYFCSQSTHVPPFTFGGGTKVEIKGGGGSGGGGSGGGGSEVQLVESGGGLVQPGGSLRLSCAASGFTFSDYYMAWVRQAPGKGLEWVADINYDGGSTYYLDSLKSRFTISRDNAKNSLYLQMNSLRAEDTAVYYCARDRGYYFDYWGQGTLVTVSSTREQKLISEEDLAKPTTTPAPRPPTPAPTIASQPLSLRPEACRPAAGGAVHTRGLDFACDIYIWAPLAGTCGVLLLSLVITLYCKRGRKKLLYIFKQPFMRPVQTTQEEDGCSCRFPEEEEGGCELRVKFSRSADAPAYQQGQNQLYNELNLGRREEYDVLDKRRGRDPEMGGKPRRKNPQEGLYNELQKDKMAEAYSEIGMKGERRRGKGHDGLYQGLSTATKDTYDALHMQALPPRSRGSGATNFSLLKQAGDVEENPGPGIHMATYEVLCEVARKLGTDDREVVLFLLNVFIPQPTLAQLIGALRALKEEGRLTFPLLAECLFRAGRRDLLRDLLHLDPRFLERHLAGTMSYFSPYQLTVLHVDGELCARDIRSLIFLSKDTIGSRSTPQTFLHWVYCMENLDLLGPTDVDALMSMLRSLSRVDLQRQVQTLMGLHLSGPSHSQHYRHTPLETDFYDYKDDDDKTSGSGEGRGSLLTCGDVEENPGPHMTEYKPTVRLATRDDVPRAVRTLAAAFADYPATRHTVDPDRHIERVTELQELFLTRVGLDIGKVWVADDGAAVAVWTTPESVEAGAVFAEIGPRMAELSGSRLAAQQQMEGLLAPHRPKEPAWFLATVGVSPDHQGKGLGSAVVLPGVEAAERAGVPAFLETSAPRNLPFYERLGFTVTADVEVPEGPRTWCMTRKPGA

SEQ ID NO: 3053 - protein, 954 aa, Artificial Sequence
  Synthetic Polypeptide
MALPVTALLLPLALLLHAARPDIQMTQSSSYLSVSLGGRVTITCKASDHINNWLAWYQQKPGNAPRLLISGATSLETGVPSRFSGSGSGKDYTLSITSLQTEDVATYYCQQYWSTPWTFGGGTKLEIKGGGGSGGGGSGGGGSQVQLQQSGAELARPGASVKLSCKASGYTFTSYWMQWVKQRPGQGLEWIGAIYPGDGDTRYTQKFKGKATLTADKSSSTAYMQLSSLASEDSAVYYCARGKVYYGSNPFAYWGQGTLVTVSATREQKLISEEDLAKPTTTPAPRPPTPAPTIASQPLSLRPEACRPAAGGAVHTRGLDFACDIYIWAPLAGTCGVLLLSLVITLYCKRGRKKLLYIFKQPFMRPVQTTQEEDGCSCRFPEEEEGGCELRVKFSRSADAPAYQQGQNQLYNELNLGRREEYDVLDKRRGRDPEMGGKPRRKNPQEGLYNELQKDKMAEAYSEIGMKGERRRGKGHDGLYQGLSTATKDTYDALHMQALPPRSRGSGATNFSLLKQAGDVEENPGPGIHMATYEVLCEVARKLGTDDREVVLFLLNVFIPQPTLAQLIGALRALKEEGRLTFPLLAECLFRAGRRDLLRDLLHLDPRFLERHLAGTMSYFSPYQLTVLHVDGELCARDIRSLIFLSKDTIGSRSTPQTFLHWVYCMENLDLLGPTDVDALMSMLRSLSRVDLQRQVQTLMGLHLSGPSHSQHYRHTPLETDFYDYKDDDDKTSGSGEGRGSLLTCGDVEENPGPHMTEYKPTVRLATRDDVPRAVRTLAAAFADYPATRHTVDPDRHIERVTELQELFLTRVGLDIGKVWVADDGAAVAVWTTPESVEAGAVFAEIGPRMAELSGSRLAAQQQMEGLLAPHRPKEPAWFLATVGVSPDHQGKGLGSAVVLPGVEAAERAGVPAFLETSAPRNLPFYERLGFTVTADVEVPEGPRTWCMTRKPGA

SEQ ID NO: 3054 - protein, 954 aa, Artificial Sequence
  Synthetic Polypeptide
MALPVTALLLPLALLLHAARPDIVMTQSHKFMSTSVGDRVSITCKASQDVSTAVAWYQQKPGQSPKLLIYSASYRYTGVPDRFTGSGSGTDFTFTISSVQAEDLAVYYCQQHYSTPPYTFGGGTKLEIKGGGGSGGGGSGGGGSQVQLQQSGPELVKPGASVKISCKASGYAFSSSWMNWVKQRPGQGLEWIGRIYPGDGDTKYNGKFKGKATLTADKSSSTAYMQLSSLTSVDSAVYFCARSTMIATGAMDYWGQGTSVTVSSTREQKLISEEDLAKPTTTPAPRPPTPAPTIASQPLSLRPEACRPAAGGAVHTRGLDFACDIYIWAPLAGTCGVLLLSLVITLYCKRGRKKLLYIFKQPFMRPVQTTQEEDGCSCRFPEEEEGGCELRVKFSRSADAPAYQQGQNQLYNELNLGRREEYDVLDKRRGRDPEMGGKPRRKNPQEGLYNELQKDKMAEAYSEIGMKGERRRGKGHDGLYQGLSTATKDTYDALHMQALPPRSRGSGATNFSLLKQAGDVEENPGPGIHMATYEVLCEVARKLGTDDREVVLFLLNVFIPQPTLAQLIGALRALKEEGRLTFPLLAECLFRAGRRDLLRDLLHLDPRFLERHLAGTMSYFSPYQLTVLHVDGELCARDIRSLIFLSKDTIGSRSTPQTFLHWVYCMENLDLLGPTDVDALMSMLRSLSRVDLQRQVQTLMGLHLSGPSHSQHYRHTPLETDFYDYKDDDDKTSGSGEGRGSLLTCGDVEENPGPHMTEYKPTVRLATRDDVPRAVRTLAAAFADYPATRHTVDPDRHIERVTELQELFLTRVGLDIGKVWVADDGAAVAVWTTPESVEAGAVFAEIGPRMAELSGSRLAAQQQMEGLLAPHRPKEPAWFLATVGVSPDHQGKGLGSAVVLPGVEAAERAGVPAFLETSAPRNLPFYERLGFTVTADVEVPEGPRTWCMTRKPGA

SEQ ID NO: 3055 - protein, 959 aa, Artificial Sequence
  Synthetic Polypeptide
MALPVTALLLPLALLLHAARPQSVLTQPPSVSGAPGQRVTISCTGSGSNIGAPYDVSWYQQLPGTAPKLLIYHNNKRPSGVPDRFSGSKSGTSASLAITGLQAEDEADYYCATVEAGLSGSVFGGGTKLTVLGAGGGGSGGGGSGGGGSQVQLVQSGAEVKKPGASVKVSCKVSGYTLTELSIHWVRQAPGKGLEWMGGFDPEENEIVYAQRFQGRVTMTEDTSTDTAYMELSSLRSEDTAVYYCAIVGSFSPLTLGLWGQGTMVTVSSTREQKLISEEDLAKPTTTPAPRPPTPAPTIASQPLSLRPEACRPAAGGAVHTRGLDFACDIYIWAPLAGTCGVLLLSLVITLYCKRGRKKLLYIFKQPFMRPVQTTQEEDGCSCRFPEEEEGGCELRVKFSRSADAPAYQQGQNQLYNELNLGRREEYDVLDKRRGRDPEMGGKPRRKNPQEGLYNELQKDKMAEAYSEIGMKGERRRGKGHDGLYQGLSTATKDTYDALHMQALPPRSRGSGATNFSLLKQAGDVEENPGPGIHMATYEVLCEVARKLGTDDREVVLFLLNVFIPQPTLAQLIGALRALKEEGRLTFPLLAECLFRAGRRDLLRDLLHLDPRFLERHLAGTMSYFSPYQLTVLHVDGELCARDIRSLIFLSKDTIGSRSTPQTFLHWVYCMENLDLLGPTDVDALMSMLRSLSRVDLQRQVQTLMGLHLSGPSHSQHYRHTPLETDFYDYKDDDDKTSGSGEGRGSLLTCGDVEENPGPHMTEYKPTVRLATRDDVPRAVRTLAAAFADYPATRHTVDPDRHIERVTELQELFLTRVGLDIGKVWVADDGAAVAVWTTPESVEAGAVFAEIGPRMAELSGSRLAAQQQMEGLLAPHRPKEPAWFLATVGVSPDHQGKGLGSAVVLPGVEAAERAGVPAFLETSAPRNLPFYERLGFTVTADVEVPEGPRTWCMTRKPGA

SEQ ID NO: 3056 - protein, 959 aa, Artificial Sequence
  Synthetic Polypeptide
MALPVTALLLPLALLLHAARPQSVLTQPPSVSGAPGQRVTISCTGSGSNIGAPYDVSWYQQLPGTAPKLLIYHNNKRPSGVPDRFSGSKSGTSASLAITGLQAEDEADYYCQSYDSSSISTIFGGGTKLTVLGAGGGGSGGGGSGGGGSQVQLVQSGAEVKKPGASVKVSCKVSGYTLTELSIHWVRQAPGKGLEWMGGFDPEENEIVYAQRFQGRVTMTEDTSTDTAYMELSSLRSEDTAVYYCAIVGSFSGIAYRPWGQGTMVTVSSTREQKLISEEDLAKPTTTPAPRPPTPAPTIASQPLSLRPEACRPAAGGAVHTRGLDFACDIYIWAPLAGTCGVLLLSLVITLYCKRGRKKLLYIFKQPFMRPVQTTQEEDGCSCRFPEEEEGGCELRVKFSRSADAPAYQQGQNQLYNELNLGRREEYDVLDKRRGRDPEMGGKPRRKNPQEGLYNELQKDKMAEAYSEIGMKGERRRGKGHDGLYQGLSTATKDTYDALHMQALPPRSRGSGATNFSLLKQAGDVEENPGPGIHMATYEVLCEVARKLGTDDREVVLFLLNVFIPQPTLAQLIGALRALKEEGRLTFPLLAECLFRAGRRDLLRDLLHLDPRFLERHLAGTMSYFSPYQLTVLHVDGELCARDIRSLIFLSKDTIGSRSTPQTFLHWVYCMENLDLLGPTDVDALMSMLRSLSRVDLQRQVQTLMGLHLSGPSHSQHYRHTPLETDFYDYKDDDDKTSGSGEGRGSLLTCGDVEENPGPHMTEYKPTVRLATRDDVPRAVRTLAAAFADYPATRHTVDPDRHIERVTELQELFLTRVGLDIGKVWVADDGAAVAVWTTPESVEAGAVFAEIGPRMAELSGSRLAAQQQMEGLLAPHRPKEPAWFLATVGVSPDHQGKGLGSAVVLPGVEAAERAGVPAFLETSAPRNLPFYERLGFTVTADVEVPEGPRTWCMTRKPGA

SEQ ID NO: 3057 - protein, 970 aa, Artificial Sequence
  Synthetic Polypeptide
MALPVTALLLPLALLLHAARPDEFEVQLVESGGGLVQAGGSLRLSCVASGISSSKRNMGWYRQAPGKQRESVATISSGGNKDYTDAVKDRFTISRDTTKNTVYLQMNSLKPEDTAVYYCKIEAGTGWATRRGYTYWGQGTLVTVSSLEGGGGSGGGGSGGGGSFEVQLVESGGGLVQAGGSLRLSCAASGSIFSGNVMGWYRRQAPGKEREWVAAIASGGSIYYRDSVKGRFTISRDNAKNTVYLQMNSLKPEDTAVYYCNSHPPTLPYWGLGTQVTVSSTREQKLISEEDLAKPTTTPAPRPPTPAPTIASQPLSLRPEACRPAAGGAVHTRGLDFACDIYIWAPLAGTCGVLLLSLVITLYCKRGRKKLLYIFKQPFMRPVQTTQEEDGCSCRFPEEEEGGCELRVKFSRSADAPAYQQGQNQLYNELNLGRREEYDVLDKRRGRDPEMGGKPRRKNPQEGLYNELQKDKMAEAYSEIGMKGERRRGKGHDGLYQGLSTATKDTYDALHMQALPPRSRGSGATNFSLLKQAGDVEENPGPGIHMATYEVLCEVARKLGTDDREVVLFLLNVFIPQPTLAQLIGALRALKEEGRLTFPLLAECLFRAGRRDLLRDLLHLDPRFLERHLAGTMSYFSPYQLTVLHVDGELCARDIRSLIFLSKDTIGSRSTPQTFLHWVYCMENLDLLGPTDVDALMSMLRSLSRVDLQRQVQTLMGLHLSGPSHSQHYRHTPLETDFYDYKDDDDKTSGSGEGRGSLLTCGDVEENPGPHMTEYKPTVRLATRDDVPRAVRTLAAAFADYPATRHTVDPDRHIERVTELQELFLTRVGLDIGKVWVADDGAAVAVWTTPESVEAGAVFAEIGPRMAELSGSRLAAQQQMEGLLAPHRPKEPAWFLATVGVSPDHQGKGLGSAVVLPGVEAAERAGVPAFLETSAPRNLPFYERLGFTVTADVEVPEGPRTWCMTRKPGA

SEQ ID NO: 3058 - protein, 1004 aa, Artificial Sequence
  Synthetic Polypeptide
MALPVTALLLPLALLLHAARPDEFEVQLVESGGGLVQAGDSLRLSCAASGRAFSRYAMGWFRQAPGKEREFVAAIGWGPSKTNYADSVKGRFTISRDNAKNTVYLQMNTLKPEDTAVYSCAAKFVNTDSTWSRSEMYTYWGQGTLVTVSSLEGGGGSGGGGSGGGGSGSGGSGSGGSGSGGSGSGGSFEVQLVESGGGSVQAGGSLRLSCTTSGRALNMYVMGWFRQAPGNEREFVAATSSSGGSTSYPDSVKGRFTISRDNAKNTVYLQMNSLKPEDTAAYRCAASPYVSTPTMNILEEYRYWGLGTQVTVSSTREQKLISEEDLAKPTTTPAPRPPTPAPTIASQPLSLRPEACRPAAGGAVHTRGLDFACDIYIWAPLAGTCGVLLLSLVITLYCKRGRKKLLYIFKQPFMRPVQTTQEEDGCSCRFPEEEEGGCELRVKFSRSADAPAYQQGQNQLYNELNLGRREEYDVLDKRRGRDPEMGGKPRRKNPQEGLYNELQKDKMAEAYSEIGMKGERRRGKGHDGLYQGLSTATKDTYDALHMQALPPRSRGSGATNFSLLKQAGDVEENPGPGIHMATYEVLCEVARKLGTDDREVVLFLLNVFIPQPTLAQLIGALRALKEEGRLTFPLLAECLFRAGRRDLLRDLLHLDPRFLERHLAGTMSYFSPYQLTVLHVDGELCARDIRSLIFLSKDTIGSRSTPQTFLHWVYCMENLDLLGPTDVDALMSMLRSLSRVDLQRQVQTLMGLHLSGPSHSQHYRHTPLETDFYDYKDDDDKTSGSGEGRGSLLTCGDVEENPGPHMTEYKPTVRLATRDDVPRAVRTLAAAFADYPATRHTVDPDRHIERVTELQELFLTRVGLDIGKVWVADDGAAVAVWTTPESVEAGAVFAEIGPRMAELSGSRLAAQQQMEGLLAPHRPKEPAWFLATVGVSPDHQGKGLGSAVVLPGVEAAERAGVPAFLETSAPRNLPFYERLGFTVTADVEVPEGPRTWCMTRKPGA

SEQ ID NO: 3059 - protein, 957 aa, Artificial Sequence
  Synthetic Polypeptide
MALPVTALLLPLALLLHAARPDIQMTQSPSSLSASVGDRVTITCSASSSVSYMYWYQQKPGKAPKLLIYLTSNLASGVPSRFSGSGSGTDFTLTISSLQPEDFATYYCQQWRSNPFTFGQGTKLEIKRGGGGSGGGGSGGGGSQITLKESGPTLVKPTQTLTLTCTFSGFSLSTSGMGVGWIRQPPGKALEWLAHIWWDDVKRYSPSLKSRLTITKDTSKNQVVLTMTNMDPVDTATYYCARIVSFDNDVVSAMDYWGQGTLVTVSSTREQKLISEEDLAKPTTTPAPRPPTPAPTIASQPLSLRPEACRPAAGGAVHTRGLDFACDIYIWAPLAGTCGVLLLSLVITLYCKRGRKKLLYIFKQPFMRPVQTTQEEDGCSCRFPEEEEGGCELRVKFSRSADAPAYQQGQNQLYNELNLGRREEYDVLDKRRGRDPEMGGKPRRKNPQEGLYNELQKDKMAEAYSEIGMKGERRRGKGHDGLYQGLSTATKDTYDALHMQALPPRSRGSGATNFSLLKQAGDVEENPGPGIHMATYEVLCEVARKLGTDDREVVLFLLNVFIPQPTLAQLIGALRALKEEGRLTFPLLAECLFRAGRRDLLRDLLHLDPRFLERHLAGTMSYFSPYQLTVLHVDGELCARDIRSLIFLSKDTIGSRSTPQTFLHWVYCMENLDLLGPTDVDALMSMLRSLSRVDLQRQVQTLMGLHLSGPSHSQHYRHTPLETDFYDYKDDDDKTSGSGEGRGSLLTCGDVEENPGPHMTEYKPTVRLATRDDVPRAVRTLAAAFADYPATRHTVDPDRHIERVTELQELFLTRVGLDIGKVWVADDGAAVAVWTTPESVEAGAVFAEIGPRMAELSGSRLAAQQQMEGLLAPHRPKEPAWFLATVGVSPDHQGKGLGSAVVLPGVEAAERAGVPAFLETSAPRNLPFYERLGFTVTADVEVPEGPRTWCMTRKPGA

SEQ ID NO: 3060 - protein, 952 aa, Artificial Sequence
  Synthetic Polypeptide
MALPVTALLLPLALLLHAARPEIVMTQSPATLSVSPGERATLSCKASQSVSNDVVWYQQKPGQAPRLLIYYASNRYTGIPARFSGSGSGTEFTLTISSLQSEDFAVYYCQQDYTSPWTFGQGTKLEIKRGGGGSGGGGSGGGGSQVQLVQSGAEVKKPGASVKVSCKASGYTFTNYGMNWVRQAPGQGLEWMGWINTYTGEPTYADDFKGRVTMTTDTSTSTAYMELRSLRSDDTAVYYCARIGDSSPSDYWGQGTLVTVSSTREQKLISEEDLAKPTTTPAPRPPTPAPTIASQPLSLRPEACRPAAGGAVHTRGLDFACDIYIWAPLAGTCGVLLLSLVITLYCKRGRKKLLYIFKQPFMRPVQTTQEEDGCSCRFPEEEEGGCELRVKFSRSADAPAYQQGQNQLYNELNLGRREEYDVLDKRRGRDPEMGGKPRRKNPQEGLYNELQKDKMAEAYSEIGMKGERRRGKGHDGLYQGLSTATKDTYDALHMQALPPRSRGSGATNFSLLKQAGDVEENPGPGIHMATYEVLCEVARKLGTDDREVVLFLLNVFIPQPTLAQLIGALRALKEEGRLTFPLLAECLFRAGRRDLLRDLLHLDPRFLERHLAGTMSYFSPYQLTVLHVDGELCARDIRSLIFLSKDTIGSRSTPQTFLHWVYCMENLDLLGPTDVDALMSMLRSLSRVDLQRQVQTLMGLHLSGPSHSQHYRHTPLETDFYDYKDDDDKTSGSGEGRGSLLTCGDVEENPGPHMTEYKPTVRLATRDDVPRAVRTLAAAFADYPATRHTVDPDRHIERVTELQELFLTRVGLDIGKVWVADDGAAVAVWTTPESVEAGAVFAEIGPRMAELSGSRLAAQQQMEGLLAPHRPKEPAWFLATVGVSPDHQGKGLGSAVVLPGVEAAERAGVPAFLETSAPRNLPFYERLGFTVTADVEVPEGPRTWCMTRKPGA

SEQ ID NO: 3061 - protein, 953 aa, Artificial Sequence
  Synthetic Polypeptide
MALPVTALLLPLALLLHAARPDSTDIQMTQSPSSLSASVGDRVTITCRASQSISSYLNWYQQKPGKAPKLLIYLASNLQSGVPSRFSGSGSGTDFTLTISSLQPEDFATYYCQQAEYMPLTFGQGTKVEIKRAGGGGSGGGGSGGGGSEVQLLESGGGLVQPGGSLRLSCAASGFTFSGYAMSWVRQAPGKGLEWVSEIAPPGLNTRYADSVKGRFTISRDNSKNTLYLQMNSLRAEDTAVYYCAKSDTAFDYWGQGTLVTVSTREQKLISEEDLAKPTTTPAPRPPTPAPTIASQPLSLRPEACRPAAGGAVHTRGLDFACDIYIWAPLAGTCGVLLLSLVITLYCKRGRKKLLYIFKQPFMRPVQTTQEEDGCSCRFPEEEEGGCELRVKFSRSADAPAYQQGQNQLYNELNLGRREEYDVLDKRRGRDPEMGGKPRRKNPQEGLYNELQKDKMAEAYSEIGMKGERRRGKGHDGLYQGLSTATKDTYDALHMQALPPRSRGSGATNFSLLKQAGDVEENPGPGIHMATYEVLCEVARKLGTDDREVVLFLLNVFIPQPTLAQLIGALRALKEEGRLTFPLLAECLFRAGRRDLLRDLLHLDPRFLERHLAGTMSYFSPYQLTVLHVDGELCARDIRSLIFLSKDTIGSRSTPQTFLHWVYCMENLDLLGPTDVDALMSMLRSLSRVDLQRQVQTLMGLHLSGPSHSQHYRHTPLETDFYDYKDDDDKTSGSGEGRGSLLTCGDVEENPGPHMTEYKPTVRLATRDDVPRAVRTLAAAFADYPATRHTVDPDRHIERVTELQELFLTRVGLDIGKVWVADDGAAVAVWTTPESVEAGAVFAEIGPRMAELSGSRLAAQQQMEGLLAPHRPKEPAWFLATVGVSPDHQGKGLGSAVVLPGVEAAERAGVPAFLETSAPRNLPFYERLGFTVTADVEVPEGPRTWCMTRKPGA

SEQ ID NO: 3062 - protein, 956 aa, Artificial Sequence
  Synthetic Polypeptide
MALPVTALLLPLALLLHAARPDQAVLTQESALTTSPGETVTLTCRSSTGAVTTSNYANWVQEKPDHLFTGLIGGTNNRVPGVPARFSGSLIGDKAALTITGAQTEDEAIYFCVLWHSNHWVFGGGTKLTVLGGGGSGGGGSGGGGSDVQLVESGGGLVQPGGSRKLSCAASGFTFSSFGMHWVRQAPEKGLEWVAYISSGSSTLHYADTVKGRFTISRDNPKNTLFLQMTSLRSEDTAMYYCARWGNYPHYAMDYWGQGTSVTVSSTREQKLISEEDLAKPTTTPAPRPPTPAPTIASQPLSLRPEACRPAAGGAVHTRGLDFACDIYIWAPLAGTCGVLLLSLVITLYCKRGRKKLLYIFKQPFMRPVQTTQEEDGCSCRFPEEEEGGCELRVKFSRSADAPAYQQGQNQLYNELNLGRREEYDVLDKRRGRDPEMGGKPRRKNPQEGLYNELQKDKMAEAYSEIGMKGERRRGKGHDGLYQGLSTATKDTYDALHMQALPPRSRGSGATNFSLLKQAGDVEENPGPGIHMATYEVLCEVARKLGTDDREVVLFLLNVFIPQPTLAQLIGALRALKEEGRLTFPLLAECLFRAGRRDLLRDLLHLDPRFLERHLAGTMSYFSPYQLTVLHVDGELCARDIRSLIFLSKDTIGSRSTPQTFLHWVYCMENLDLLGPTDVDALMSMLRSLSRVDLQRQVQTLMGLHLSGPSHSQHYRHTPLETDFYDYKDDDDKTSGSGEGRGSLLTCGDVEENPGPHMTEYKPTVRLATRDDVPRAVRTLAAAFADYPATRHTVDPDRHIERVTELQELFLTRVGLDIGKVWVADDGAAVAVWTTPESVEAGAVFAEIGPRMAELSGSRLAAQQQMEGLLAPHRPKEPAWFLATVGVSPDHQGKGLGSAVVLPGVEAAERAGVPAFLETSAPRNLPFYERLGFTVTADVEVPEGPRTWCMTRKPGA

SEQ ID NO: 3063 - protein, 838 aa, Artificial Sequence
  Synthetic Polypeptide
MALPVTALLLPLALLLHAARPDEFEVQLVESGGGSVQTGGSLRLTCAASGRTSRSYGMGWFRQAPGKEREFVSGISWRGDSTGYADSVKGRFTISRDNAKNTVDLQMNSLKPEDTAIYYCAAAAGSAWYGTLYEYDYWGQGTLVTVSSTREQKLISEEDLAKPTTTPAPRPPTPAPTIASQPLSLRPEACRPAAGGAVHTRGLDFACDIYIWAPLAGTCGVLLLSLVITLYCKRGRKKLLYIFKQPFMRPVQTTQEEDGCSCRFPEEEEGGCELRVKFSRSADAPAYQQGQNQLYNELNLGRREEYDVLDKRRGRDPEMGGKPRRKNPQEGLYNELQKDKMAEAYSEIGMKGERRRGKGHDGLYQGLSTATKDTYDALHMQALPPRSRGSGATNFSLLKQAGDVEENPGPGIHMATYEVLCEVARKLGTDDREVVLFLLNVFIPQPTLAQLIGALRALKEEGRLTFPLLAECLFRAGRRDLLRDLLHLDPRFLERHLAGTMSYFSPYQLTVLHVDGELCARDIRSLIFLSKDTIGSRSTPQTFLHWVYCMENLDLLGPTDVDALMSMLRSLSRVDLQRQVQTLMGLHLSGPSHSQHYRHTPLETDFYDYKDDDDKTSGSGEGRGSLLTCGDVEENPGPHMTEYKPTVRLATRDDVPRAVRTLAAAFADYPATRHTVDPDRHIERVTELQELFLTRVGLDIGKVWVADDGAAVAVWTTPESVEAGAVFAEIGPRMAELSGSRLAAQQQMEGLLAPHRPKEPAWFLATVGVSPDHQGKGLGSAVVLPGVEAAERAGVPAFLETSAPRNLPFYERLGFTVTADVEVPEGPRTWCMTRKPGA

SEQ ID NO: 3064 - protein, 980 aa, Artificial Sequence
  Synthetic Polypeptide
MALPVTALLLPLALLLHAARPDEFEVQLVESGGGSVQTGGSLRLTCAASGRTSRSYGMGWFRQAPGKEREFVSGISWRGDSTGYADSVKGRFTISRDNAKNTVDLQMNSLKPEDTAIYYCAAAAGSAWYGTLYEYDYWGQGTLVTVSSLEGGGGSGGGGSGGGGSFEEVQLVESGGGSVQAGGSLRLSCAASGDTYGSYWMGWFRQAPGKEREGVAAINRGGGYTVYADSVKGRFTISRDTAKNTVYLQMNSLRPDDTADYYCAASGVLGGLHEDWFNYWGQGTLVTVSSTREQKLISEEDLAKPTTTPAPRPPTPAPTIASQPLSLRPEACRPAAGGAVHTRGLDFACDIYIWAPLAGTCGVLLLSLVITLYCKRGRKKLLYIFKQPFMRPVQTTQEEDGCSCRFPEEEEGGCELRVKFSRSADAPAYQQGQNQLYNELNLGRREEYDVLDKRRGRDPEMGGKPRRKNPQEGLYNELQKDKMAEAYSEIGMKGERRRGKGHDGLYQGLSTATKDTYDALHMQALPPRSRGSGATNFSLLKQAGDVEENPGPGIHMATYEVLCEVARKLGTDDREVVLFLLNVFIPQPTLAQLIGALRALKEEGRLTFPLLAECLFRAGRRDLLRDLLHLDPRFLERHLAGTMSYFSPYQLTVLHVDGELCARDIRSLIFLSKDTIGSRSTPQTFLHWVYCMENLDLLGPTDVDALMSMLRSLSRVDLQRQVQTLMGLHLSGPSHSQHYRHTPLETDFYDYKDDDDKTSGSGEGRGSLLTCGDVEENPGPHMTEYKPTVRLATRDDVPRAVRTLAAAFADYPATRHTVDPDRHIERVTELQELFLTRVGLDIGKVWVADDGAAVAVWTTPESVEAGAVFAEIGPRMAELSGSRLAAQQQMEGLLAPHRPKEPAWFLATVGVSPDHQGKGLGSAVVLPGVEAAERAGVPAFLETSAPRNLPFYERLGFTVTADVEVPEGPRTWCMTRKPGA

SEQ ID NO: 3065 - protein, 999 aa, Artificial Sequence
  Synthetic Polypeptide
MALPVTALLLPLALLLHAARPDEFEVQLVESGGGSVQAGGSLRLTCAASGSTSRSYGMGWFRQAPGKEREFVSGISWRGDSTGYADSVKGRFTISRDNAKNTVDLQMNSLKPEDTAIYYCAAAAGSTWYGTLYEYDYWGQGTLVTVSSLEGGGGSGGGGSGGGGSGSGGSGSGGSGSGGSGSGGSFEVQLVESGGGSVQAGGSLRLSCAASGDTYGSYWMGWFRQAPGQEREAVAAINRGGGYTVYADSVKGRFTISRDNAKNTLYLQMNSLRPDDTADYYCAASGVLGGLHEDWFNYWGQGTLVTVSSTREQKLISEEDLAKPTTTPAPRPPTPAPTIASQPLSLRPEACRPAAGGAVHTRGLDFACDIYIWAPLAGTCGVLLLSLVITLYCKRGRKKLLYIFKQPFMRPVQTTQEEDGCSCRFPEEEEGGCELRVKFSRSADAPAYQQGQNQLYNELNLGRREEYDVLDKRRGRDPEMGGKPRRKNPQEGLYNELQKDKMAEAYSEIGMKGERRRGKGHDGLYQGLSTATKDTYDALHMQALPPRSRGSGATNFSLLKQAGDVEENPGPGIHMATYEVLCEVARKLGTDDREVVLFLLNVFIPQPTLAQLIGALRALKEEGRLTFPLLAECLFRAGRRDLLRDLLHLDPRFLERHLAGTMSYFSPYQLTVLHVDGELCARDIRSLIFLSKDTIGSRSTPQTFLHWVYCMENLDLLGPTDVDALMSMLRSLSRVDLQRQVQTLMGLHLSGPSHSQHYRHTPLETDFYDYKDDDDKTSGSGEGRGSLLTCGDVEENPGPHMTEYKPTVRLATRDDVPRAVRTLAAAFADYPATRHTVDPDRHIERVTELQELFLTRVGLDIGKVWVADDGAAVAVWTTPESVEAGAVFAEIGPRMAELSGSRLAAQQQMEGLLAPHRPKEPAWFLATVGVSPDHQGKGLGSAVVLPGVEAAERAGVPAFLETSAPRNLPFYERLGFTVTADVEVPEGPRTWCMTRKPGA

SEQ ID NO: 3066 - protein, 947 aa, Artificial Sequence
  Synthetic Polypeptide
MALPVTALLLPLALLLHAARPDIQMTQSPSSLSASVGDRVTITCRASQGIRNNLAWYQQKPGKAPKRLIYAASNLQSGVPSRFTGSGSGTEFTLIVSSLQPEDFATYYCLQHHSYPLTSGGGTKVEGGGGSGGGGSGGGGSEVQVLESGGGLVQPGGSLRLSCAASGFTFSSYAMSWVRQAPGKGLEWVSAISGSGGSTNYADSVKGRFTISRDNSKNTLYLQMNSLRAEDTAVYYCAGSSGWSEYWGQGTLVTVSSTREQKLISEEDLAKPTTTPAPRPPTPAPTIASQPLSLRPEACRPAAGGAVHTRGLDFACDIYIWAPLAGTCGVLLLSLVITLYCKRGRKKLLYIFKQPFMRPVQTTQEEDGCSCRFPEEEEGGCELRVKFSRSADAPAYQQGQNQLYNELNLGRREEYDVLDKRRGRDPEMGGKPRRKNPQEGLYNELQKDKMAEAYSEIGMKGERRRGKGHDGLYQGLSTATKDTYDALHMQALPPRSRGSGATNFSLLKQAGDVEENPGPGIHMATYEVLCEVARKLGTDDREVVLFLLNVFIPQPTLAQLIGALRALKEEGRLTFPLLAECLFRAGRRDLLRDLLHLDPRFLERHLAGTMSYFSPYQLTVLHVDGELCARDIRSLIFLSKDTIGSRSTPQTFLHWVYCMENLDLLGPTDVDALMSMLRSLSRVDLQRQVQTLMGLHLSGPSHSQHYRHTPLETDFYDYKDDDDKTSGSGEGRGSLLTCGDVEENPGPHMTEYKPTVRLATRDDVPRAVRTLAAAFADYPATRHTVDPDRHIERVTELQELFLTRVGLDIGKVWVADDGAAVAVWTTPESVEAGAVFAEIGPRMAELSGSRLAAQQQMEGLLAPHRPKEPAWFLATVGVSPDHQGKGLGSAVVLPGVEAAERAGVPAFLETSAPRNLPFYERLGFTVTADVEVPEGPRTWCMTRKPGA

SEQ ID NO: 3067 - protein, 953 aa, Artificial Sequence
  Synthetic Polypeptide
MALPVTALLLPLALLLHAARPDEIQLVQSGAEVKKPGESLRISCKGSGFNIEDYYIHWVRQMPGKGLEWMGRIDPENDETKYGPIFQGHVTISADTSINTVYLQWSSLKASDTAMYYCAFRGGVYWGQGTTVTVSSGGGGSGGGGSGGGGSDVVMTQSPDSLAVSLGERATINCKSSQSLLDSDGKTYLNWLQQKPGQPPKRLISLVSKLDSGVPDRFSGSGSGTDFTLTISSLQAEDVAVYYCWQGTHFPGTFGGGTKVEIKTREQKLISEEDLAKPTTTPAPRPPTPAPTIASQPLSLRPEACRPAAGGAVHTRGLDFACDIYIWAPLAGTCGVLLLSLVITLYCKRGRKKLLYIFKQPFMRPVQTTQEEDGCSCRFPEEEEGGCELRVKFSRSADAPAYQQGQNQLYNELNLGRREEYDVLDKRRGRDPEMGGKPRRKNPQEGLYNELQKDKMAEAYSEIGMKGERRRGKGHDGLYQGLSTATKDTYDALHMQALPPRSRGSGATNFSLLKQAGDVEENPGPGIHMATYEVLCEVARKLGTDDREVVLFLLNVFIPQPTLAQLIGALRALKEEGRLTFPLLAECLFRAGRRDLLRDLLHLDPRFLERHLAGTMSYFSPYQLTVLHVDGELCARDIRSLIFLSKDTIGSRSTPQTFLHWVYCMENLDLLGPTDVDALMSMLRSLSRVDLQRQVQTLMGLHLSGPSHSQHYRHTPLETDFYDYKDDDDKTSGSGEGRGSLLTCGDVEENPGPHMTEYKPTVRLATRDDVPRAVRTLAAAFADYPATRHTVDPDRHIERVTELQELFLTRVGLDIGKVWVADDGAAVAVWTTPESVEAGAVFAEIGPRMAELSGSRLAAQQQMEGLLAPHRPKEPAWFLATVGVSPDHQGKGLGSAVVLPGVEAAERAGVPAFLETSAPRNLPFYERLGFTVTADVEVPEGPRTWCMTRKPGA

SEQ ID NO: 3068 - protein, 960 aa, Artificial Sequence
  Synthetic Polypeptide
MALPVTALLLPLALLLHAARPDELVMTQSPSSLTVTAGEKVTMSCKSSQSLLNSGNQKNYLTWYQQKPGQPPKLLIYWASTRESGVPDRFTGSGSGTDFTLTISSVQAEDLAVYYCQNDYSYPLTFGAGTKLEIKGGGGSGGGGSGGGGSEVQLLEQSGAELVRPGTSVKISCKASGYAFTNYWLGWVKQRPGHGLEWIGDIFPGSGNIHYNEKFKGKATLTADKSSSTAYMQLSSLTFEDSAVYFCARLRNWDEPMDYWGQGTTVTVSSTREQKLISEEDLAKPTTTPAPRPPTPAPTIASQPLSLRPEACRPAAGGAVHTRGLDFACDIYIWAPLAGTCGVLLLSLVITLYCKRGRKKLLYIFKQPFMRPVQTTQEEDGCSCRFPEEEEGGCELRVKFSRSADAPAYQQGQNQLYNELNLGRREEYDVLDKRRGRDPEMGGKPRRKNPQEGLYNELQKDKMAEAYSEIGMKGERRRGKGHDGLYQGLSTATKDTYDALHMQALPPRSRGSGATNFSLLKQAGDVEENPGPGIHMATYEVLCEVARKLGTDDREVVLFLLNVFIPQPTLAQLIGALRALKEEGRLTFPLLAECLFRAGRRDLLRDLLHLDPRFLERHLAGTMSYFSPYQLTVLHVDGELCARDIRSLIFLSKDTIGSRSTPQTFLHWVYCMENLDLLGPTDVDALMSMLRSLSRVDLQRQVQTLMGLHLSGPSHSQHYRHTPLETDFYDYKDDDDKTSGSGEGRGSLLTCGDVEENPGPHMTEYKPTVRLATRDDVPRAVRTLAAAFADYPATRHTVDPDRHIERVTELQELFLTRVGLDIGKVWVADDGAAVAVWTTPESVEAGAVFAEIGPRMAELSGSRLAAQQQMEGLLAPHRPKEPAWFLATVGVSPDHQGKGLGSAVVLPGVEAAERAGVPAFLETSAPRNLPFYERLGFTVTADVEVPEGPRTWCMTRKPGA

SEQ ID NO: 3069 - protein, 961 aa, Artificial Sequence
  Synthetic Polypeptide
MALPVTALLLPLALLLHAARPDELQMTQSPSSLSASVGDRVTITCRASQSISSYLNWYQQKPGQPPKLLIYWASTRESGVPDRFSGSESGTNYTLTISSLQPEDFATYFCQQSDSLPITFGQGTRLDIQGGGGSGGGGSGGGGSEVQLLESGGGVVQPGRSLRLSCAASGFTFSSYGMHWVRQAPGKGLEWVAVISYDGSNKYYADSVKGRFTISRDNSKNTLYLQMNSLRAEDTAVYYCAKDMGWGSGWRPYYYYGMDVWGQGTTVTVSSTREQKLISEEDLAKPTTTPAPRPPTPAPTIASQPLSLRPEACRPAAGGAVHTRGLDFACDIYIWAPLAGTCGVLLLSLVITLYCKRGRKKLLYIFKQPFMRPVQTTQEEDGCSCRFPEEEEGGCELRVKFSRSADAPAYQQGQNQLYNELNLGRREEYDVLDKRRGRDPEMGGKPRRKNPQEGLYNELQKDKMAEAYSEIGMKGERRRGKGHDGLYQGLSTATKDTYDALHMQALPPRSRGSGATNFSLLKQAGDVEENPGPGIHMATYEVLCEVARKLGTDDREVVLFLLNVFIPQPTLAQLIGALRALKEEGRLTFPLLAECLFRAGRRDLLRDLLHLDPRFLERHLAGTMSYFSPYQLTVLHVDGELCARDIRSLIFLSKDTIGSRSTPQTFLHWVYCMENLDLLGPTDVDALMSMLRSLSRVDLQRQVQTLMGLHLSGPSHSQHYRHTPLETDFYDYKDDDDKTSGSGEGRGSLLTCGDVEENPGPHMTEYKPTVRLATRDDVPRAVRTLAAAFADYPATRHTVDPDRHIERVTELQELFLTRVGLDIGKVWVADDGAAVAVWTTPESVEAGAVFAEIGPRMAELSGSRLAAQQQMEGLLAPHRPKEPAWFLATVGVSPDHQGKGLGSAVVLPGVEAAERAGVPAFLETSAPRNLPFYERLGFTVTADVEVPEGPRTWCMTRKPGA

SEQ ID NO: 3070 - protein, 958 aa, Artificial Sequence
  Synthetic Polypeptide
MALPVTALLLPLALLLHAARPDDIQMTQSPSSLSASVGDRVTITCRASQSISSYLNWYQQKPGKAPKLLIYAASSLQSGVPSRFSGSGSGTDFTLTISSLQPEDLATYYCQQSYSTPFTFGPGTKVDIKGGGGSGGGGSGGGGSVHEVQLVQSGAEVKKPGSSVKVSCKASGGTFSSYAISWVRQAPGQGLEWMGGIIPIFGTANYAQKFQGRVTITADKSTSTAYMELSSLRSEDTAVYYCATFALFGFREQAFDIWGQGTTVTVSSTREQKLISEEDLAKPTTTPAPRPPTPAPTIASQPLSLRPEACRPAAGGAVHTRGLDFACDIYIWAPLAGTCGVLLLSLVITLYCKRGRKKLLYIFKQPFMRPVQTTQEEDGCSCRFPEEEEGGCELRVKFSRSADAPAYQQGQNQLYNELNLGRREEYDVLDKRRGRDPEMGGKPRRKNPQEGLYNELQKDKMAEAYSEIGMKGERRRGKGHDGLYQGLSTATKDTYDALHMQALPPRSRGSGATNFSLLKQAGDVEENPGPGIHMATYEVLCEVARKLGTDDREVVLFLLNVFIPQPTLAQLIGALRALKEEGRLTFPLLAECLFRAGRRDLLRDLLHLDPRFLERHLAGTMSYFSPYQLTVLHVDGELCARDIRSLIFLSKDTIGSRSTPQTFLHWVYCMENLDLLGPTDVDALMSMLRSLSRVDLQRQVQTLMGLHLSGPSHSQHYRHTPLETDFYDYKDDDDKTSGSGEGRGSLLTCGDVEENPGPHMTEYKPTVRLATRDDVPRAVRTLAAAFADYPATRHTVDPDRHIERVTELQELFLTRVGLDIGKVWVADDGAAVAVWTTPESVEAGAVFAEIGPRMAELSGSRLAAQQQMEGLLAPHRPKEPAWFLATVGVSPDHQGKGLGSAVVLPGVEAAERAGVPAFLETSAPRNLPFYERLGFTVTADVEVPEGPRTWCMTRKPGA

SEQ ID NO: 3071 - protein, 955 aa, Artificial Sequence
  Synthetic Polypeptide
MALPVTALLLPLALLLHAARPDVVMTQTPLSLPVSLGDQASISCRSSQSLVHSNGNTYLRWYLQKPGQSPKVLIYKVSNRFSGVPDRFSGSGSGTDFTLKISRVEAEDLGVYFCSQSTHVPWTFGGGTKLEIKGGGGSGGGGSGGGGSEVKLDETGGGLVQPGRPMKLSCVASGFTFSDYWMNWVRQSPEKGLEWVAQIRNKPYNYETYYSDSVKGRFTISRDDSKSSVYLQMNNLRVEDMGIYYCTGSYYGMDYWGQGTSVTVSTREQKLISEEDLAKPTTTPAPRPPTPAPTIASQPLSLRPEACRPAAGGAVHTRGLDFACDIYIWAPLAGTCGVLLLSLVITLYCKRGRKKLLYIFKQPFMRPVQTTQEEDGCSCRFPEEEEGGCELRVKFSRSADAPAYQQGQNQLYNELNLGRREEYDVLDKRRGRDPEMGGKPRRKNPQEGLYNELQKDKMAEAYSEIGMKGERRRGKGHDGLYQGLSTATKDTYDALHMQALPPRSRGSGATNFSLLKQAGDVEENPGPGIHMATYEVLCEVARKLGTDDREVVLFLLNVFIPQPTLAQLIGALRALKEEGRLTFPLLAECLFRAGRRDLLRDLLHLDPRFLERHLAGTMSYFSPYQLTVLHVDGELCARDIRSLIFLSKDTIGSRSTPQTFLHWVYCMENLDLLGPTDVDALMSMLRSLSRVDLQRQVQTLMGLHLSGPSHSQHYRHTPLETDFYDYKDDDDKTSGSGEGRGSLLTCGDVEENPGPHMTEYKPTVRLATRDDVPRAVRTLAAAFADYPATRHTVDPDRHIERVTELQELFLTRVGLDIGKVWVADDGAAVAVWTTPESVEAGAVFAEIGPRMAELSGSRLAAQQQMEGLLAPHRPKEPAWFLATVGVSPDHQGKGLGSAVVLPGVEAAERAGVPAFLETSAPRNLPFYERLGFTVTADVEVPEGPRTWCMTRKPGA

SEQ ID NO: 3072 - protein, 966 aa, Artificial Sequence
  Synthetic Polypeptide
MALPVTALLLPLALLLHAARPDVVMTQTPLSLPVSLGDQASISCRSSQSLVHSNGNTYLRWYLQKPGQSPKVLIYKVSNRVSGVPDRFSGSGSGTDFTLKINRVEAEDLGVYFCSQSTHVPWTFGGGTKLEIKSSADDAKKDAAKKDDAKKDDAKKDGGVKLDETGGGLVQPGGAMKLSCVTSGFTFGHYWMNWVRQSPEKGLEWVAQFRNKPYNYETYYSDSVKGRFTISRDDSKSSVYLQMNNLRVEDTGIYYCTGASYGMEYLGQGTSVTVSTTREQKLISEEDLAKPTTTPAPRPPTPAPTIASQPLSLRPEACRPAAGGAVHTRGLDFACDIYIWAPLAGTCGVLLLSLVITLYCKRGRKKLLYIFKQPFMRPVQTTQEEDGCSCRFPEEEEGGCELRVKFSRSADAPAYQQGQNQLYNELNLGRREEYDVLDKRRGRDPEMGGKPRRKNPQEGLYNELQKDKMAEAYSEIGMKGERRRGKGHDGLYQGLSTATKDTYDALHMQALPPRSRGSGATNFSLLKQAGDVEENPGPGIHMATYEVLCEVARKLGTDDREVVLFLLNVFIPQPTLAQLIGALRALKEEGRLTFPLLAECLFRAGRRDLLRDLLHLDPRFLERHLAGTMSYFSPYQLTVLHVDGELCARDIRSLIFLSKDTIGSRSTPQTFLHWVYCMENLDLLGPTDVDALMSMLRSLSRVDLQRQVQTLMGLHLSGPSHSQHYRHTPLETDFYDYKDDDDKTSGSGEGRGSLLTCGDVEENPGPHMTEYKPTVRLATRDDVPRAVRTLAAAFADYPATRHTVDPDRHIERVTELQELFLTRVGLDIGKVWVADDGAAVAVWTTPESVEAGAVFAEIGPRMAELSGSRLAAQQQMEGLLAPHRPKEPAWFLATVGVSPDHQGKGLGSAVVLPGVEAAERAGVPAFLETSAPRNLPFYERLGFTVTADVEVPEGPRTWCMTRKPGA

SEQ ID NO: 3073 - protein, 962 aa, Artificial Sequence
  Synthetic Polypeptide
MALPVTALLLPLALLLHAARPQVQLVESGGNLVQPGGSLRLSCAASGFTFGSFSMSWVRQAPGGGLEWVAGLSARSSLTHYADSVKGRFTISRDNAKNSVYLQMNSLRVEDTAVYYCARRSYDSSGYWGHFYSYMDVWGQGTLVTVSGGGGSGGGGSGGGGSSVLTQPSSVSAAPGQKVTISCSGSTSNIGNNYVSWYQQHPGKAPKLMIYDVSKRPSGVPDRFSGSKSGNSASLDISGLQSEDEADYYCAAWDDSLSEFLFGTGTKLTVLGTREQKLISEEDLAKPTTTPAPRPPTPAPTIASQPLSLRPEACRPAAGGAVHTRGLDFACDIYIWAPLAGTCGVLLLSLVITLYCKRGRKKLLYIFKQPFMRPVQTTQEEDGCSCRFPEEEEGGCELRVKFSRSADAPAYQQGQNQLYNELNLGRREEYDVLDKRRGRDPEMGGKPRRKNPQEGLYNELQKDKMAEAYSEIGMKGERRRGKGHDGLYQGLSTATKDTYDALHMQALPPRSRGSGATNFSLLKQAGDVEENPGPGIHMATYEVLCEVARKLGTDDREVVLFLLNVFIPQPTLAQLIGALRALKEEGRLTFPLLAECLFRAGRRDLLRDLLHLDPRFLERHLAGTMSYFSPYQLTVLHVDGELCARDIRSLIFLSKDTIGSRSTPQTFLHWVYCMENLDLLGPTDVDALMSMLRSLSRVDLQRQVQTLMGLHLSGPSHSQHYRHTPLETDFYDYKDDDDKTSGSGEGRGSLLTCGDVEENPGPHMTEYKPTVRLATRDDVPRAVRTLAAAFADYPATRHTVDPDRHIERVTELQELFLTRVGLDIGKVWVADDGAAVAVWTTPESVEAGAVFAEIGPRMAELSGSRLAAQQQMEGLLAPHRPKEPAWFLATVGVSPDHQGKGLGSAVVLPGVEAAERAGVPAFLETSAPRNLPFYERLGFTVTADVEVPEGPRTWCMTRKPGA

SEQ ID NO: 3074 - protein, 957 aa, Artificial Sequence
  Synthetic Polypeptide
MALPVTALLLPLALLLHAARPDIQMTQSPSSLSASVGDRVTITCRTSQSLSSYTHWYQQKPGKAPKLLIYAASSRGSGVPSRFSGSGSGTDFTLTISSLQPEDFATYYCQQSRTFGQGTKVEIKGGGGSGGGGSGGGGSQVQLQQSGPGLVKPSQTLSLTCAISGDSVSSYNAVWNWIRQSPSRGLEWLGRTYYRSGWYNDYAESVKSRITINPDTSKNQFSLQLNSVTPEDTAVYYCARSGHITVFGVNVDAFDMWGQGTMVTVSSTREQKLISEEDLAKPTTTPAPRPPTPAPTIASQPLSLRPEACRPAAGGAVHTRGLDFACDIYIWAPLAGTCGVLLLSLVITLYCKRGRKKLLYIFKQPFMRPVQTTQEEDGCSCRFPEEEEGGCELRVKFSRSADAPAYQQGQNQLYNELNLGRREEYDVLDKRRGRDPEMGGKPRRKNPQEGLYNELQKDKMAEAYSEIGMKGERRRGKGHDGLYQGLSTATKDTYDALHMQALPPRSRGSGATNFSLLKQAGDVEENPGPGIHMATYEVLCEVARKLGTDDREVVLFLLNVFIPQPTLAQLIGALRALKEEGRLTFPLLAECLFRAGRRDLLRDLLHLDPRFLERHLAGTMSYFSPYQLTVLHVDGELCARDIRSLIFLSKDTIGSRSTPQTFLHWVYCMENLDLLGPTDVDALMSMLRSLSRVDLQRQVQTLMGLHLSGPSHSQHYRHTPLETDFYDYKDDDDKTSGSGEGRGSLLTCGDVEENPGPHMTEYKPTVRLATRDDVPRAVRTLAAAFADYPATRHTVDPDRHIERVTELQELFLTRVGLDIGKVWVADDGAAVAVWTTPESVEAGAVFAEIGPRMAELSGSRLAAQQQMEGLLAPHRPKEPAWFLATVGVSPDHQGKGLGSAVVLPGVEAAERAGVPAFLETSAPRNLPFYERLGFTVTADVEVPEGPRTWCMTRKPGA

SEQ ID NO: 3075 - protein, 956 aa, Artificial Sequence
  Synthetic Polypeptide
MALPVTALLLPLALLLHAARPDIVLTQSPLSLAVSLGQPAIISCKASQSVSFAGTSLMHWYHQKPGQQPRLLIYRASNLEAGVPDRFSGSGSKTDFTLTISPVEAEDAATYYCQQSREYPYTFGGGTKLEIKRGGGGSGGGGSGGGGSQVQLVQSGAEVVKPGASVKISCKASGYTFTGYFMNWVKQSPGQSLEWIGRIHPYDGDTFYNQKFQGKATLTVDKSSNTAHMELLSLTSEDFAVYYCTRYDGSRAMDYWGQGTTVTVSSTREQKLISEEDLAKPTTTPAPRPPTPAPTIASQPLSLRPEACRPAAGGAVHTRGLDFACDIYIWAPLAGTCGVLLLSLVITLYCKRGRKKLLYIFKQPFMRPVQTTQEEDGCSCRFPEEEEGGCELRVKFSRSADAPAYQQGQNQLYNELNLGRREEYDVLDKRRGRDPEMGGKPRRKNPQEGLYNELQKDKMAEAYSEIGMKGERRRGKGHDGLYQGLSTATKDTYDALHMQALPPRSRGSGATNFSLLKQAGDVEENPGPGIHMATYEVLCEVARKLGTDDREVVLFLLNVFIPQPTLAQLIGALRALKEEGRLTFPLLAECLFRAGRRDLLRDLLHLDPRFLERHLAGTMSYFSPYQLTVLHVDGELCARDIRSLIFLSKDTIGSRSTPQTFLHWVYCMENLDLLGPTDVDALMSMLRSLSRVDLQRQVQTLMGLHLSGPSHSQHYRHTPLETDFYDYKDDDDKTSGSGEGRGSLLTCGDVEENPGPHMTEYKPTVRLATRDDVPRAVRTLAAAFADYPATRHTVDPDRHIERVTELQELFLTRVGLDIGKVWVADDGAAVAVWTTPESVEAGAVFAEIGPRMAELSGSRLAAQQQMEGLLAPHRPKEPAWFLATVGVSPDHQGKGLGSAVVLPGVEAAERAGVPAFLETSAPRNLPFYERLGFTVTADVEVPEGPRTWCMTRKPGA

SEQ ID NO: 3076 - protein, 929 aa, Artificial Sequence
  Synthetic Polypeptide
MALPVTALLLPLALLLHAARPNSCELTNITIAIEKEECRFCISINTTWCAGYCYTRDLVYKDPARPKIQKTCTFKELVYETVRVPGCAHHADSLYTYPVATQCHCGKCDSDSTDCTVRGLGPSYCSFGEMKEGGGGSGGGGSGGGGSAPDVQDCPECTLQENPFFSQPGAPILQCMGCCFSRAYPTPLRSKKTMLVQKNVTSESTCCVAKSYNRVTVMGGFKVENHTACHCSTCYYHKSTREQKLISEEDLAKPTTTPAPRPPTPAPTIASQPLSLRPEACRPAAGGAVHTRGLDFACDIYIWAPLAGTCGVLLLSLVITLYCKRGRKKLLYIFKQPFMRPVQTTQEEDGCSCRFPEEEEGGCELRVKFSRSADAPAYQQGQNQLYNELNLGRREEYDVLDKRRGRDPEMGGKPRRKNPQEGLYNELQKDKMAEAYSEIGMKGERRRGKGHDGLYQGLSTATKDTYDALHMQALPPRSRGSGATNFSLLKQAGDVEENPGPGIHMATYEVLCEVARKLGTDDREVVLFLLNVFIPQPTLAQLIGALRALKEEGRLTFPLLAECLFRAGRRDLLRDLLHLDPRFLERHLAGTMSYFSPYQLTVLHVDGELCARDIRSLIFLSKDTIGSRSTPQTFLHWVYCMENLDLLGPTDVDALMSMLRSLSRVDLQRQVQTLMGLHLSGPSHSQHYRHTPLETDFYDYKDDDDKTSGSGEGRGSLLTCGDVEENPGPHMTEYKPTVRLATRDDVPRAVRTLAAAFADYPATRHTVDPDRHIERVTELQELFLTRVGLDIGKVWVADDGAAVAVWTTPESVEAGAVFAEIGPRMAELSGSRLAAQQQMEGLLAPHRPKEPAWFLATVGVSPDHQGKGLGSAVVLPGVEAAERAGVPAFLETSAPRNLPFYERLGFTVTADVEVPEGPRTWCMTRKPGA

SEQ ID NO: 3077 - protein, 960 aa, Artificial Sequence
  Synthetic Polypeptide
MALPVTALLLPLALLLHAARPDLETTLTQSPATLSVSPGERVTLSCRASQSVGSNLAWYQQKFGQAPRLLIYDASTRATGIPARFSGSGSGTEFTLTISRLEPEDFAVYYCHQYGSSPRTFGQGTKVDIKRGGGGSGGGGSGGGGSQVQLVQSGAEVKKPGASVKVSCKASGYTFTTYGISWVRQAPGQGLEWMGWISAYNGHTNYAQMLQGRVTMTTDTSTSTAYMELRGLRSDDTAVYYCAREAYASYGSGSYWTDYWGQGTLVTVSSTREQKLISEEDLAKPTTTPAPRPPTPAPTIASQPLSLRPEACRPAAGGAVHTRGLDFACDIYIWAPLAGTCGVLLLSLVITLYCKRGRKKLLYIFKQPFMRPVQTTQEEDGCSCRFPEEEEGGCELRVKFSRSADAPAYQQGQNQLYNELNLGRREEYDVLDKRRGRDPEMGGKPRRKNPQEGLYNELQKDKMAEAYSEIGMKGERRRGKGHDGLYQGLSTATKDTYDALHMQALPPRSRGSGATNFSLLKQAGDVEENPGPGIHMATYEVLCEVARKLGTDDREVVLFLLNVFIPQPTLAQLIGALRALKEEGRLTFPLLAECLFRAGRRDLLRDLLHLDPRFLERHLAGTMSYFSPYQLTVLHVDGELCARDIRSLIFLSKDTIGSRSTPQTFLHWVYCMENLDLLGPTDVDALMSMLRSLSRVDLQRQVQTLMGLHLSGPSHSQHYRHTPLETDFYDYKDDDDKTSGSGEGRGSLLTCGDVEENPGPHMTEYKPTVRLATRDDVPRAVRTLAAAFADYPATRHTVDPDRHIERVTELQELFLTRVGLDIGKVWVADDGAAVAVWTTPESVEAGAVFAEIGPRMAELSGSRLAAQQQMEGLLAPHRPKEPAWFLATVGVSPDHQGKGLGSAVVLPGVEAAERAGVPAFLETSAPRNLPFYERLGFTVTADVEVPEGPRTWCMTRKPGA

SEQ ID NO: 3078 - protein, 953 aa, Artificial Sequence
  Synthetic Polypeptide
MALPVTALLLPLALLLHAARPDDVVMTQTPLSLPVTPGEPASISCRSSQSLVHRNGNTYLHWYLQKPGQSPKLLIHKVSNRFSGVPDRFSGSGSGTDFTLKISRVEAEDLGVYFCSQSTHVPPLTFGAGTKLELKGGGGSGGGGSGGGGSEVQLVQSGAEVEKPGASVKISCKASGSSFTGYNMNWVRQNIGKSLEWIGAIDPYYGGTSYNQKFKGRATLTVDKSTSTAYMHLKSLRSEDTAVYYCVSGMEYWGQGTSVTVSSTREQKLISEEDLAKPTTTPAPRPPTPAPTIASQPLSLRPEACRPAAGGAVHTRGLDFACDIYIWAPLAGTCGVLLLSLVITLYCKRGRKKLLYIFKQPFMRPVQTTQEEDGCSCRFPEEEEGGCELRVKFSRSADAPAYQQGQNQLYNELNLGRREEYDVLDKRRGRDPEMGGKPRRKNPQEGLYNELQKDKMAEAYSEIGMKGERRRGKGHDGLYQGLSTATKDTYDALHMQALPPRSRGSGATNFSLLKQAGDVEENPGPGIHMATYEVLCEVARKLGTDDREVVLFLLNVFIPQPTLAQLIGALRALKEEGRLTFPLLAECLFRAGRRDLLRDLLHLDPRFLERHLAGTMSYFSPYQLTVLHVDGELCARDIRSLIFLSKDTIGSRSTPQTFLHWVYCMENLDLLGPTDVDALMSMLRSLSRVDLQRQVQTLMGLHLSGPSHSQHYRHTPLETDFYDYKDDDDKTSGSGEGRGSLLTCGDVEENPGPHMTEYKPTVRLATRDDVPRAVRTLAAAFADYPATRHTVDPDRHIERVTELQELFLTRVGLDIGKVWVADDGAAVAVWTTPESVEAGAVFAEIGPRMAELSGSRLAAQQQMEGLLAPHRPKEPAWFLATVGVSPDHQGKGLGSAVVLPGVEAAERAGVPAFLETSAPRNLPFYERLGFTVTADVEVPEGPRTWCMTRKPGA

SEQ ID NO: 3079 - protein, 951 aa, Artificial Sequence
  Synthetic Polypeptide
MALPVTALLLPLALLLHAARPDEIVMTQTPATLSVSAGERVTITCKASQSVSNDVTWYQQKPGQAPRLLIYSASNRYSGVPARFSGSGYGTEFTFTISSVQSEDFAVYFCQQDYSSFGQGTKLEIKRGGGGSGGGGSGGGGSQVQLVESGPGVVQPGRSLRISCAVSGFSVTNYGVHWVRQPPGKGLEWLGVIWAGGITNYNSAFMSRLTISKDNSKNTVYLQMNSLRAEDTAMYYCASRGGHYGYALDYWGQGTLVTVSSTREQKLISEEDLAKPTTTPAPRPPTPAPTIASQPLSLRPEACRPAAGGAVHTRGLDFACDIYIWAPLAGTCGVLLLSLVITLYCKRGRKKLLYIFKQPFMRPVQTTQEEDGCSCRFPEEEEGGCELRVKFSRSADAPAYQQGQNQLYNELNLGRREEYDVLDKRRGRDPEMGGKPRRKNPQEGLYNELQKDKMAEAYSEIGMKGERRRGKGHDGLYQGLSTATKDTYDALHMQALPPRSRGSGATNFSLLKQAGDVEENPGPGIHMATYEVLCEVARKLGTDDREVVLFLLNVFIPQPTLAQLIGALRALKEEGRLTFPLLAECLFRAGRRDLLRDLLHLDPRFLERHLAGTMSYFSPYQLTVLHVDGELCARDIRSLIFLSKDTIGSRSTPQTFLHWVYCMENLDLLGPTDVDALMSMLRSLSRVDLQRQVQTLMGLHLSGPSHSQHYRHTPLETDFYDYKDDDDKTSGSGEGRGSLLTCGDVEENPGPHMTEYKPTVRLATRDDVPRAVRTLAAAFADYPATRHTVDPDRHIERVTELQELFLTRVGLDIGKVWVADDGAAVAVWTTPESVEAGAVFAEIGPRMAELSGSRLAAQQQMEGLLAPHRPKEPAWFLATVGVSPDHQGKGLGSAVVLPGVEAAERAGVPAFLETSAPRNLPFYERLGFTVTADVEVPEGPRTWCMTRKPGA

SEQ ID NO: 3080 - protein, 953 aa, Artificial Sequence
  Synthetic Polypeptide
MALPVTALLLPLALLLHAARPDIQMTQTASSLPASLGDRVTISCSASQDISNYLNWYQQKPDGTVKLLIFYSSNLHSGVPSRFSGGGSGTDYSLTISNLEPEDIATYFCHQYSKLPWTFGGGTKLEIKRGGGGSGGGGSGGGGSEVTLVESGGDFVKPGGSLKVSCAASGFAFSHYAMSWVRQTPAKRLEWVAYISSGGSGTYYSDSVKGRFTISRDNAKNTLYLQMRSLRSEDSAMYFCTRVKLGTYYFDSWGQGTTLTVSSTREQKLISEEDLAKPTTTPAPRPPTPAPTIASQPLSLRPEACRPAAGGAVHTRGLDFACDIYIWAPLAGTCGVLLLSLVITLYCKRGRKKLLYIFKQPFMRPVQTTQEEDGCSCRFPEEEEGGCELRVKFSRSADAPAYQQGQNQLYNELNLGRREEYDVLDKRRGRDPEMGGKPRRKNPQEGLYNELQKDKMAEAYSEIGMKGERRRGKGHDGLYQGLSTATKDTYDALHMQALPPRSRGSGATNFSLLKQAGDVEENPGPGIHMATYEVLCEVARKLGTDDREVVLFLLNVFIPQPTLAQLIGALRALKEEGRLTFPLLAECLFRAGRRDLLRDLLHLDPRFLERHLAGTMSYFSPYQLTVLHVDGELCARDIRSLIFLSKDTIGSRSTPQTFLHWVYCMENLDLLGPTDVDALMSMLRSLSRVDLQRQVQTLMGLHLSGPSHSQHYRHTPLETDFYDYKDDDDKTSGSGEGRGSLLTCGDVEENPGPHMTEYKPTVRLATRDDVPRAVRTLAAAFADYPATRHTVDPDRHIERVTELQELFLTRVGLDIGKVWVADDGAAVAVWTTPESVEAGAVFAEIGPRMAELSGSRLAAQQQMEGLLAPHRPKEPAWFLATVGVSPDHQGKGLGSAVVLPGVEAAERAGVPAFLETSAPRNLPFYERLGFTVTADVEVPEGPRTWCMTRKPGA

SEQ ID NO: 3081 - protein, 955 aa, Artificial Sequence
  Synthetic Polypeptide
MALPVTALLLPLALLLHAARPQFVLTQSPSASAALGASAKLTCTLSSAHKTYTIDWYQQQKGKAPRYLIQVKSDGTYTKATGVPDRFSGSSSGADRYLIIPSVQADDEADYYCGTDYTGGYVFGGGTQLTVTGGGGSGGGGSGGGGSEQLKESGGGLFKPTDTLTLTCTVSGFSLSYYGVNWVRQAPGNGLEWIGTIGGSGDTYYASWAKSRSTIIRNTNENTVTLKMTSLTAADTATYFCVRYANIGYEYFNVWGPGTLVTVSSTREQKLISEEDLAKPTTTPAPRPPTPAPTIASQPLSLRPEACRPAAGGAVHTRGLDFACDIYIWAPLAGTCGVLLLSLVITLYCKRGRKKLLYIFKQPFMRPVQTTQEEDGCSCRFPEEEEGGCELRVKFSRSADAPAYQQGQNQLYNELNLGRREEYDVLDKRRGRDPEMGGKPRRKNPQEGLYNELQKDKMAEAYSEIGMKGERRRGKGHDGLYQGLSTATKDTYDALHMQALPPRSRGSGATNFSLLKQAGDVEENPGPGIHMATYEVLCEVARKLGTDDREVVLFLLNVFIPQPTLAQLIGALRALKEEGRLTFPLLAECLFRAGRRDLLRDLLHLDPRFLERHLAGTMSYFSPYQLTVLHVDGELCARDIRSLIFLSKDTIGSRSTPQTFLHWVYCMENLDLLGPTDVDALMSMLRSLSRVDLQRQVQTLMGLHLSGPSHSQHYRHTPLETDFYDYKDDDDKTSGSGEGRGSLLTCGDVEENPGPHMTEYKPTVRLATRDDVPRAVRTLAAAFADYPATRHTVDPDRHIERVTELQELFLTRVGLDIGKVWVADDGAAVAVWTTPESVEAGAVFAEIGPRMAELSGSRLAAQQQMEGLLAPHRPKEPAWFLATVGVSPDHQGKGLGSAVVLPGVEAAERAGVPAFLETSAPRNLPFYERLGFTVTADVEVPEGPRTWCMTRKPGA

SEQ ID NO: 3082 - protein, 960 aa, Artificial Sequence
  Synthetic Polypeptide
MALPVTALLLPLALLLHAARPQFVLTQSPSVSAALGASAKLTCTLSSAHKTYTIDWYQQQQGEAPRYLMQVKSDGSYTKGTGVPDRFSGSSSGADRYLIIPSVQADDEAGYVCGADDNGGYVFGGGTQLTVTGGGGSGGGGSGGGGSQSVKESEGGLFKPTDTLTLTCTVSGFSLSRHALTWVRQAPGNGLEWIGAIDNAGTTYYASWAKSRSTITRNTDLHTVTLKMTSLTASDTATYFCARVFYDINSGYYLDGMDLWGPGTLVTVSSTREQKLISEEDLAKPTTTPAPRPPTPAPTIASQPLSLRPEACRPAAGGAVHTRGLDFACDIYIWAPLAGTCGVLLLSLVITLYCKRGRKKLLYIFKQPFMRPVQTTQEEDGCSCRFPEEEEGGCELRVKFSRSADAPAYQQGQNQLYNELNLGRREEYDVLDKRRGRDPEMGGKPRRKNPQEGLYNELQKDKMAEAYSEIGMKGERRRGKGHDGLYQGLSTATKDTYDALHMQALPPRSRGSGATNFSLLKQAGDVEENPGPGIHMATYEVLCEVARKLGTDDREVVLFLLNVFIPQPTLAQLIGALRALKEEGRLTFPLLAECLFRAGRRDLLRDLLHLDPRFLERHLAGTMSYFSPYQLTVLHVDGELCARDIRSLIFLSKDTIGSRSTPQTFLHWVYCMENLDLLGPTDVDALMSMLRSLSRVDLQRQVQTLMGLHLSGPSHSQHYRHTPLETDFYDYKDDDDKTSGSGEGRGSLLTCGDVEENPGPHMTEYKPTVRLATRDDVPRAVRTLAAAFADYPATRHTVDPDRHIERVTELQELFLTRVGLDIGKVWVADDGAAVAVWTTPESVEAGAVFAEIGPRMAELSGSRLAAQQQMEGLLAPHRPKEPAWFLATVGVSPDHQGKGLGSAVVLPGVEAAERAGVPAFLETSAPRNLPFYERLGFTVTADVEVPEGPRTWCMTRKPGA

SEQ ID NO: 3083 - protein, 954 aa, Artificial Sequence
  Synthetic Polypeptide
MALPVTALLLPLALLLHAARPDIQMTQSPSSLSASVGDRVTITCRASQGISSWLAWYQQKPEKAPKSLIYAASSLQSGVPSRFSGSGSGTDFTLTISSLQPEDFATYYCQQYNSYPPTFGGGTKVEIKGGGGSGGGGSGGGGSEVQLVESGGGLVQPGESLRLSCVASGFTFSRYKMNWVRQAPGKGLEWVSYISRSGRDIYYADSVKGRFTISRDNAKNSLYLQMNSLRDEDTAVYYCAGTVTTYYYFGMDVWGHGTTVTVSSTREQKLISEEDLAKPTTTPAPRPPTPAPTIASQPLSLRPEACRPAAGGAVHTRGLDFACDIYIWAPLAGTCGVLLLSLVITLYCKRGRKKLLYIFKQPFMRPVQTTQEEDGCSCRFPEEEEGGCELRVKFSRSADAPAYQQGQNQLYNELNLGRREEYDVLDKRRGRDPEMGGKPRRKNPQEGLYNELQKDKMAEAYSEIGMKGERRRGKGHDGLYQGLSTATKDTYDALHMQALPPRSRGSGATNFSLLKQAGDVEENPGPGIHMATYEVLCEVARKLGTDDREVVLFLLNVFIPQPTLAQLIGALRALKEEGRLTFPLLAECLFRAGRRDLLRDLLHLDPRFLERHLAGTMSYFSPYQLTVLHVDGELCARDIRSLIFLSKDTIGSRSTPQTFLHWVYCMENLDLLGPTDVDALMSMLRSLSRVDLQRQVQTLMGLHLSGPSHSQHYRHTPLETDFYDYKDDDDKTSGSGEGRGSLLTCGDVEENPGPHMTEYKPTVRLATRDDVPRAVRTLAAAFADYPATRHTVDPDRHIERVTELQELFLTRVGLDIGKVWVADDGAAVAVWTTPESVEAGAVFAEIGPRMAELSGSRLAAQQQMEGLLAPHRPKEPAWFLATVGVSPDHQGKGLGSAVVLPGVEAAERAGVPAFLETSAPRNLPFYERLGFTVTADVEVPEGPRTWCMTRKPGA

SEQ ID NO: 3084 - protein, 955 aa, Artificial Sequence
  Synthetic Polypeptide
MALPVTALLLPLALLLHAARPDIQMTQSPSSLSASVGDRVTITCRASQGISSWLAWYQQKPEKAPKSLIYAASSLQSGVPSRFSGSGSGTDFTLTISSLQPEDFATYYCQQYNSYPPTFGGGTKVEIKGGGGSGGGGSGGGGSEVQLVESGGGSVQPGESLRLSCVASGFTFSRYKMNWVRQAPGKGLEWVSYISRSGRDIYYADSVKGRFTISRDNAKNSLYLQMNSLRDEDTAVYYCAGTVTTYYYDFGMDVWGQGTTVTVSSTREQKLISEEDLAKPTTTPAPRPPTPAPTIASQPLSLRPEACRPAAGGAVHTRGLDFACDIYIWAPLAGTCGVLLLSLVITLYCKRGRKKLLYIFKQPFMRPVQTTQEEDGCSCRFPEEEEGGCELRVKFSRSADAPAYQQGQNQLYNELNLGRREEYDVLDKRRGRDPEMGGKPRRKNPQEGLYNELQKDKMAEAYSEIGMKGERRRGKGHDGLYQGLSTATKDTYDALHMQALPPRSRGSGATNFSLLKQAGDVEENPGPGIHMATYEVLCEVARKLGTDDREVVLFLLNVFIPQPTLAQLIGALRALKEEGRLTFPLLAECLFRAGRRDLLRDLLHLDPRFLERHLAGTMSYFSPYQLTVLHVDGELCARDIRSLIFLSKDTIGSRSTPQTFLHWVYCMENLDLLGPTDVDALMSMLRSLSRVDLQRQVQTLMGLHLSGPSHSQHYRHTPLETDFYDYKDDDDKTSGSGEGRGSLLTCGDVEENPGPHMTEYKPTVRLATRDDVPRAVRTLAAAFADYPATRHTVDPDRHIERVTELQELFLTRVGLDIGKVWVADDGAAVAVWTTPESVEAGAVFAEIGPRMAELSGSRLAAQQQMEGLLAPHRPKEPAWFLATVGVSPDHQGKGLGSAVVLPGVEAAERAGVPAFLETSAPRNLPFYERLGFTVTADVEVPEGPRTWCMTRKPGA

SEQ ID NO: 3085 - protein, 954 aa, Artificial Sequence
  Synthetic Polypeptide
MALPVTALLLPLALLLHAARPQSVLTQPPSASGTPGQRVTISCSGSRSNVGGNYVFWYQQVPGATPKLLIYRSNQRPSGVPDRFAGSKSGSSASLAISGLRSEDEADYYCATWDDSLSGFVFGTGTKVTVLGGGGGSGGGGSGGGGSEVQLVESGGGLVKPGGSLRLSCAASGFTFSDYYMSWIRQAPGKGLEWVSYISSSGSTIYYADSVKGRFTISRDNAKNSLYLQMNSLRAEDTAVYYCARGYGKAYDQWGQGTLVTVSSTREQKLISEEDLAKPTTTPAPRPPTPAPTIASQPLSLRPEACRPAAGGAVHTRGLDFACDIYIWAPLAGTCGVLLLSLVITLYCKRGRKKLLYIFKQPFMRPVQTTQEEDGCSCRFPEEEEGGCELRVKFSRSADAPAYQQGQNQLYNELNLGRREEYDVLDKRRGRDPEMGGKPRRKNPQEGLYNELQKDKMAEAYSEIGMKGERRRGKGHDGLYQGLSTATKDTYDALHMQALPPRSRGSGATNFSLLKQAGDVEENPGPGIHMATYEVLCEVARKLGTDDREVVLFLLNVFIPQPTLAQLIGALRALKEEGRLTFPLLAECLFRAGRRDLLRDLLHLDPRFLERHLAGTMSYFSPYQLTVLHVDGELCARDIRSLIFLSKDTIGSRSTPQTFLHWVYCMENLDLLGPTDVDALMSMLRSLSRVDLQRQVQTLMGLHLSGPSHSQHYRHTPLETDFYDYKDDDDKTSGSGEGRGSLLTCGDVEENPGPHMTEYKPTVRLATRDDVPRAVRTLAAAFADYPATRHTVDPDRHIERVTELQELFLTRVGLDIGKVWVADDGAAVAVWTTPESVEAGAVFAEIGPRMAELSGSRLAAQQQMEGLLAPHRPKEPAWFLATVGVSPDHQGKGLGSAVVLPGVEAAERAGVPAFLETSAPRNLPFYERLGFTVTADVEVPEGPRTWCMTRKPGA

SEQ ID NO: 3086 - protein, 953 aa, Artificial Sequence
  Synthetic Polypeptide
MALPVTALLLPLALLLHAARPQSVVTQPPSMSAAPGQQVTISCSGGNSNIERNYVSWYLQLPGTAPKLVIFDNDRRPSGIPDRFSGSKSGTSATLGITGLQTGDEADYYCGTWDSSLRGWVFGGGTKLTVLGGGGGSGGGGSGGGGSEVQLVESGGGLIQPGGSLRLSCAASGFTFSNYAMNWVRQAPGKGLEWVSTINGRGSSTIYADSVKGRFTISRDNSKNTLYLQMNSLRAEDTATYYCARYISRGLGDSWGQGTLVTVTREQKLISEEDLAKPTTTPAPRPPTPAPTIASQPLSLRPEACRPAAGGAVHTRGLDFACDIYIWAPLAGTCGVLLLSLVITLYCKRGRKKLLYIFKQPFMRPVQTTQEEDGCSCRFPEEEEGGCELRVKFSRSADAPAYQQGQNQLYNELNLGRREEYDVLDKRRGRDPEMGGKPRRKNPQEGLYNELQKDKMAEAYSEIGMKGERRRGKGHDGLYQGLSTATKDTYDALHMQALPPRSRGSGATNFSLLKQAGDVEENPGPGIHMATYEVLCEVARKLGTDDREVVLFLLNVFIPQPTLAQLIGALRALKEEGRLTFPLLAECLFRAGRRDLLRDLLHLDPRFLERHLAGTMSYFSPYQLTVLHVDGELCARDIRSLIFLSKDTIGSRSTPQTFLHWVYCMENLDLLGPTDVDALMSMLRSLSRVDLQRQVQTLMGLHLSGPSHSQHYRHTPLETDFYDYKDDDDKTSGSGEGRGSLLTCGDVEENPGPHMTEYKPTVRLATRDDVPRAVRTLAAAFADYPATRHTVDPDRHIERVTELQELFLTRVGLDIGKVWVADDGAAVAVWTTPESVEAGAVFAEIGPRMAELSGSRLAAQQQMEGLLAPHRPKEPAWFLATVGVSPDHQGKGLGSAVVLPGVEAAERAGVPAFLETSAPRNLPFYERLGFTVTADVEVPEGPRTWCMTRKPGA

SEQ ID NO: 3087 - protein, 953 aa, Artificial Sequence
  Synthetic Polypeptide
MALPVTALLLPLALLLHAARPQSVVTQPPSVSGAPGQRVTISCTGSSSNIGAGYDVHWYQQLPGTAPKLLIYGNSNRPSGVPDRFSGSKSGTSASLAITGLQAEDEADYYCQSYDSSLSGSYVFGTGTKLTVLGGGGGSGGGGSGGGGSEVQLVETGGNLVQPGASLRLSCAASGFSFSGTAMHWVRQAPGKGLEWVSTISSTGRSTYYRDSVKGRFTISRDNSKNTLYLQMNSLRGEDTAVYYCARVSFDYWGQGTLVTVSSTREQKLISEEDLAKPTTTPAPRPPTPAPTIASQPLSLRPEACRPAAGGAVHTRGLDFACDIYIWAPLAGTCGVLLLSLVITLYCKRGRKKLLYIFKQPFMRPVQTTQEEDGCSCRFPEEEEGGCELRVKFSRSADAPAYQQGQNQLYNELNLGRREEYDVLDKRRGRDPEMGGKPRRKNPQEGLYNELQKDKMAEAYSEIGMKGERRRGKGHDGLYQGLSTATKDTYDALHMQALPPRSRGSGATNFSLLKQAGDVEENPGPGIHMATYEVLCEVARKLGTDDREVVLFLLNVFIPQPTLAQLIGALRALKEEGRLTFPLLAECLFRAGRRDLLRDLLHLDPRFLERHLAGTMSYFSPYQLTVLHVDGELCARDIRSLIFLSKDTIGSRSTPQTFLHWVYCMENLDLLGPTDVDALMSMLRSLSRVDLQRQVQTLMGLHLSGPSHSQHYRHTPLETDFYDYKDDDDKTSGSGEGRGSLLTCGDVEENPGPHMTEYKPTVRLATRDDVPRAVRTLAAAFADYPATRHTVDPDRHIERVTELQELFLTRVGLDIGKVWVADDGAAVAVWTTPESVEAGAVFAEIGPRMAELSGSRLAAQQQMEGLLAPHRPKEPAWFLATVGVSPDHQGKGLGSAVVLPGVEAAERAGVPAFLETSAPRNLPFYERLGFTVTADVEVPEGPRTWCMTRKPGA

SEQ ID NO: 3088 - protein, 955 aa, Artificial Sequence
  Synthetic Polypeptide
MALPVTALLLPLALLLHAARPQSVVTQPASVSGSPGQSITISCTGTSSDVGGYNYVSWYQQHPGKAPKLMIYDVSKRPSGVSNRFSGSKSGNTASLTISGLQAEDEADYYCSSYTSSSTLVFGGGTKLTVLGGGGGSGGGGSGGGGSEVQLVESGGAFVQPGGSLRLSCAASGFTFSSYAMTWVRQAPGKGLEWVSTISGRGRSTFYADSVKGRFTISRDNSKNTLYLQMNSLRAEDTAVYYCARYYHAGAFDLWGQGTLVTVSSTREQKLISEEDLAKPTTTPAPRPPTPAPTIASQPLSLRPEACRPAAGGAVHTRGLDFACDIYIWAPLAGTCGVLLLSLVITLYCKRGRKKLLYIFKQPFMRPVQTTQEEDGCSCRFPEEEEGGCELRVKFSRSADAPAYQQGQNQLYNELNLGRREEYDVLDKRRGRDPEMGGKPRRKNPQEGLYNELQKDKMAEAYSEIGMKGERRRGKGHDGLYQGLSTATKDTYDALHMQALPPRSRGSGATNFSLLKQAGDVEENPGPGIHMATYEVLCEVARKLGTDDREVVLFLLNVFIPQPTLAQLIGALRALKEEGRLTFPLLAECLFRAGRRDLLRDLLHLDPRFLERHLAGTMSYFSPYQLTVLHVDGELCARDIRSLIFLSKDTIGSRSTPQTFLHWVYCMENLDLLGPTDVDALMSMLRSLSRVDLQRQVQTLMGLHLSGPSHSQHYRHTPLETDFYDYKDDDDKTSGSGEGRGSLLTCGDVEENPGPHMTEYKPTVRLATRDDVPRAVRTLAAAFADYPATRHTVDPDRHIERVTELQELFLTRVGLDIGKVWVADDGAAVAVWTTPESVEAGAVFAEIGPRMAELSGSRLAAQQQMEGLLAPHRPKEPAWFLATVGVSPDHQGKGLGSAVVLPGVEAAERAGVPAFLETSAPRNLPFYERLGFTVTADVEVPEGPRTWCMTRKPGA

SEQ ID NO: 3089 - protein, 953 aa, Artificial Sequence
  Synthetic Polypeptide
MALPVTALLLPLALLLHAARPDNIELTQSPAIMSASPGERVTMTCSASSSIRYIYWYQQKPGSSPRLLIYDTSNVAPGVPFRFSGSGSGTSYSLTINRMEAEDAATYYCQEWSGYPYTFGGGTKLDIKRGGGGSGGGGSGGGGSQVKLQESGGGLVKPGGSLKLSCAASGFTFSSYGMSWVRQTPDKRLEWVATISSGGSYTYYPDSVKGRFTISRDNAKNTLYLQMSSLKSEDTAMYYCARGNWEGWYFDVWGQGTTVTVSSTREQKLISEEDLAKPTTTPAPRPPTPAPTIASQPLSLRPEACRPAAGGAVHTRGLDFACDIYIWAPLAGTCGVLLLSLVITLYCKRGRKKLLYIFKQPFMRPVQTTQEEDGCSCRFPEEEEGGCELRVKFSRSADAPAYQQGQNQLYNELNLGRREEYDVLDKRRGRDPEMGGKPRRKNPQEGLYNELQKDKMAEAYSEIGMKGERRRGKGHDGLYQGLSTATKDTYDALHMQALPPRSRGSGATNFSLLKQAGDVEENPGPGIHMATYEVLCEVARKLGTDDREVVLFLLNVFIPQPTLAQLIGALRALKEEGRLTFPLLAECLFRAGRRDLLRDLLHLDPRFLERHLAGTMSYFSPYQLTVLHVDGELCARDIRSLIFLSKDTIGSRSTPQTFLHWVYCMENLDLLGPTDVDALMSMLRSLSRVDLQRQVQTLMGLHLSGPSHSQHYRHTPLETDFYDYKDDDDKTSGSGEGRGSLLTCGDVEENPGPHMTEYKPTVRLATRDDVPRAVRTLAAAFADYPATRHTVDPDRHIERVTELQELFLTRVGLDIGKVWVADDGAAVAVWTTPESVEAGAVFAEIGPRMAELSGSRLAAQQQMEGLLAPHRPKEPAWFLATVGVSPDHQGKGLGSAVVLPGVEAAERAGVPAFLETSAPRNLPFYERLGFTVTADVEVPEGPRTWCMTRKPGA

SEQ ID NO: 3090 - protein, 963 aa, Artificial Sequence
  Synthetic Polypeptide
MALPVTALLLPLALLLHAARPDNFMLTQPHSVSESPGKTVTISCTGSGGSIDNNYVHWYQQRPGSAPTTVMFEDNQRPSGVPDRFSGSIDSSSNSASLVISGLKTEDEGDYYCQSSDGSKVVFGGGTKLTVLGQGGGGSGGGGSGGGGSEVQLVQSGGGSLTLSCAASGVVQPGRFTFSSYGMHWVRQAPGKGLEWVSVISYDGSNKYYADSVKGRFTISRDNSKNTLYLQMNSLRTEDTAVYYCAKTLSAGEWIGGGAFDIWGHGTMVTVSSTREQKLISEEDLAKPTTTPAPRPPTPAPTIASQPLSLRPEACRPAAGGAVHTRGLDFACDIYIWAPLAGTCGVLLLSLVITLYCKRGRKKLLYIFKQPFMRPVQTTQEEDGCSCRFPEEEEGGCELRVKFSRSADAPAYQQGQNQLYNELNLGRREEYDVLDKRRGRDPEMGGKPRRKNPQEGLYNELQKDKMAEAYSEIGMKGERRRGKGHDGLYQGLSTATKDTYDALHMQALPPRSRGSGATNFSLLKQAGDVEENPGPGIHMATYEVLCEVARKLGTDDREVVLFLLNVFIPQPTLAQLIGALRALKEEGRLTFPLLAECLFRAGRRDLLRDLLHLDPRFLERHLAGTMSYFSPYQLTVLHVDGELCARDIRSLIFLSKDTIGSRSTPQTFLHWVYCMENLDLLGPTDVDALMSMLRSLSRVDLQRQVQTLMGLHLSGPSHSQHYRHTPLETDFYDYKDDDDKTSGSGEGRGSLLTCGDVEENPGPHMTEYKPTVRLATRDDVPRAVRTLAAAFADYPATRHTVDPDRHIERVTELQELFLTRVGLDIGKVWVADDGAAVAVWTTPESVEAGAVFAEIGPRMAELSGSRLAAQQQMEGLLAPHRPKEPAWFLATVGVSPDHQGKGLGSAVVLPGVEAAERAGVPAFLETSAPRNLPFYERLGFTVTADVEVPEGPRTWCMTRKPGA

SEQ ID NO: 3091 - protein, 953 aa, Artificial Sequence
  Synthetic Polypeptide
MALPVTALLLPLALLLHAARPDVVMTQTPLSLPVSLGDQASISCRSSQSLVHSNGNTYLHWYLQKPGQSPKLLIYKVSNRFSGVPDRFSGSGSGTDFTLKISRVEAEDLGVYFCSQNTPVPPKFGSGTKLEIKGGGGSGGGGSGGGGSQVQLQQSGAELVRPGASVKLSCKASGYTFNDYEMHWVKQTPVHGLKWIGALEPKTGDTAYSQKFKGKATLTADKSSSTAYMELRSLTSEDSAVYYCTSCYYYTYSGQGTLVTVSATREQKLISEEDLAKPTTTPAPRPPTPAPTIASQPLSLRPEACRPAAGGAVHTRGLDFACDIYIWAPLAGTCGVLLLSLVITLYCKRGRKKLLYIFKQPFMRPVQTTQEEDGCSCRFPEEEEGGCELRVKFSRSADAPAYQQGQNQLYNELNLGRREEYDVLDKRRGRDPEMGGKPRRKNPQEGLYNELQKDKMAEAYSEIGMKGERRRGKGHDGLYQGLSTATKDTYDALHMQALPPRSRGSGATNFSLLKQAGDVEENPGPGIHMATYEVLCEVARKLGTDDREVVLFLLNVFIPQPTLAQLIGALRALKEEGRLTFPLLAECLFRAGRRDLLRDLLHLDPRFLERHLAGTMSYFSPYQLTVLHVDGELCARDIRSLIFLSKDTIGSRSTPQTFLHWVYCMENLDLLGPTDVDALMSMLRSLSRVDLQRQVQTLMGLHLSGPSHSQHYRHTPLETDFYDYKDDDDKTSGSGEGRGSLLTCGDVEENPGPHMTEYKPTVRLATRDDVPRAVRTLAAAFADYPATRHTVDPDRHIERVTELQELFLTRVGLDIGKVWVADDGAAVAVWTTPESVEAGAVFAEIGPRMAELSGSRLAAQQQMEGLLAPHRPKEPAWFLATVGVSPDHQGKGLGSAVVLPGVEAAERAGVPAFLETSAPRNLPFYERLGFTVTADVEVPEGPRTWCMTRKPGA

SEQ ID NO: 3092 - protein, 952 aa, Artificial Sequence
  Synthetic Polypeptide
MALPVTALLLPLALLLHAARPDIQLTQSPSSLSASVGDRVTITCRASQGIRNDLGWYQQKPGKAPKRLIYAASSLQNGVPSRFSGSGSGTEFTLTISSLQPEDFATYYCLQHNTYPAFGQGTKVEIKRGGGGSGGGGSGGGGSQVQLQESGPGLVKPSQTLSLTCTVSGGSISSFNYYWSWIRHHPGKGLEWIGYIYYSGSTYSNPSLKSRVTISVDTSKNQFSLTLSSVTAADTAVYYCARGYNWNYFDYWGQGTLVTVSSTREQKLISEEDLAKPTTTPAPRPPTPAPTIASQPLSLRPEACRPAAGGAVHTRGLDFACDIYIWAPLAGTCGVLLLSLVITLYCKRGRKKLLYIFKQPFMRPVQTTQEEDGCSCRFPEEEEGGCELRVKFSRSADAPAYQQGQNQLYNELNLGRREEYDVLDKRRGRDPEMGGKPRRKNPQEGLYNELQKDKMAEAYSEIGMKGERRRGKGHDGLYQGLSTATKDTYDALHMQALPPRSRGSGATNFSLLKQAGDVEENPGPGIHMATYEVLCEVARKLGTDDREVVLFLLNVFIPQPTLAQLIGALRALKEEGRLTFPLLAECLFRAGRRDLLRDLLHLDPRFLERHLAGTMSYFSPYQLTVLHVDGELCARDIRSLIFLSKDTIGSRSTPQTFLHWVYCMENLDLLGPTDVDALMSMLRSLSRVDLQRQVQTLMGLHLSGPSHSQHYRHTPLETDFYDYKDDDDKTSGSGEGRGSLLTCGDVEENPGPHMTEYKPTVRLATRDDVPRAVRTLAAAFADYPATRHTVDPDRHIERVTELQELFLTRVGLDIGKVWVADDGAAVAVWTTPESVEAGAVFAEIGPRMAELSGSRLAAQQQMEGLLAPHRPKEPAWFLATVGVSPDHQGKGLGSAVVLPGVEAAERAGVPAFLETSAPRNLPFYERLGFTVTADVEVPEGPRTWCMTRKPGA

SEQ ID NO: 3093 - protein, 954 aa, Artificial Sequence
  Synthetic Polypeptide
MALPVTALLLPLALLLHAARPDDIVLTQSPASLAVSLGQSVTISCRASESVEYYGTSLMQWYQQKPGQPPKLLIYATSNVESGVPARFSGSGSGTDFSLNIHPVEEDDIAMYFCQQSRKLPSTFGGGTKLEIKGGGGSGGGGSGGGGSDVRLQESGPGQVKPSQTVSLTCSVTGYSITNGNHWWNWIRQVSGSKLEWIGYISSSGSTDSNPSLKSRISITRDTSKNQLFLQLNSVTTEDIATYYCARGYYFDYWGQGTTLTVSSTREQKLISEEDLAKPTTTPAPRPPTPAPTIASQPLSLRPEACRPAAGGAVHTRGLDFACDIYIWAPLAGTCGVLLLSLVITLYCKRGRKKLLYIFKQPFMRPVQTTQEEDGCSCRFPEEEEGGCELRVKFSRSADAPAYQQGQNQLYNELNLGRREEYDVLDKRRGRDPEMGGKPRRKNPQEGLYNELQKDKMAEAYSEIGMKGERRRGKGHDGLYQGLSTATKDTYDALHMQALPPRSRGSGATNFSLLKQAGDVEENPGPGIHMATYEVLCEVARKLGTDDREVVLFLLNVFIPQPTLAQLIGALRALKEEGRLTFPLLAECLFRAGRRDLLRDLLHLDPRFLERHLAGTMSYFSPYQLTVLHVDGELCARDIRSLIFLSKDTIGSRSTPQTFLHWVYCMENLDLLGPTDVDALMSMLRSLSRVDLQRQVQTLMGLHLSGPSHSQHYRHTPLETDFYDYKDDDDKTSGSGEGRGSLLTCGDVEENPGPHMTEYKPTVRLATRDDVPRAVRTLAAAFADYPATRHTVDPDRHIERVTELQELFLTRVGLDIGKVWVADDGAAVAVWTTPESVEAGAVFAEIGPRMAELSGSRLAAQQQMEGLLAPHRPKEPAWFLATVGVSPDHQGKGLGSAVVLPGVEAAERAGVPAFLETSAPRNLPFYERLGFTVTADVEVPEGPRTWCMTRKPGA

SEQ ID NO: 3094 - protein, 832 aa, Artificial Sequence
  Synthetic Polypeptide
MALPVTALLLPLALLLHAARPDEFEVQLVESGGGLVQAGGSLRLSCAASGITFSINTMGWYRQAPGKQRELVALISSIGDTYYADSVKGRFTISRDNAKNTVYLQMNSLKPEDTAVYYCKRFRTAAQGTDYWGQGTQVTVSSTREQKLISEEDLAKPTTTPAPRPPTPAPTIASQPLSLRPEACRPAAGGAVHTRGLDFACDIYIWAPLAGTCGVLLLSLVITLYCKRGRKKLLYIFKQPFMRPVQTTQEEDGCSCRFPEEEEGGCELRVKFSRSADAPAYQQGQNQLYNELNLGRREEYDVLDKRRGRDPEMGGKPRRKNPQEGLYNELQKDKMAEAYSEIGMKGERRRGKGHDGLYQGLSTATKDTYDALHMQALPPRSRGSGATNFSLLKQAGDVEENPGPGIHMATYEVLCEVARKLGTDDREVVLFLLNVFIPQPTLAQLIGALRALKEEGRLTFPLLAECLFRAGRRDLLRDLLHLDPRFLERHLAGTMSYFSPYQLTVLHVDGELCARDIRSLIFLSKDTIGSRSTPQTFLHWVYCMENLDLLGPTDVDALMSMLRSLSRVDLQRQVQTLMGLHLSGPSHSQHYRHTPLETDFYDYKDDDDKTSGSGEGRGSLLTCGDVEENPGPHMTEYKPTVRLATRDDVPRAVRTLAAAFADYPATRHTVDPDRHIERVTELQELFLTRVGLDIGKVWVADDGAAVAVWTTPESVEAGAVFAEIGPRMAELSGSRLAAQQQMEGLLAPHRPKEPAWFLATVGVSPDHQGKGLGSAVVLPGVEAAERAGVPAFLETSAPRNLPFYERLGFTVTADVEVPEGPRTWCMTRKPGA

SEQ ID NO: 3095 - protein, 767 aa, Artificial Sequence
  Synthetic Polypeptide
MDWIWRILFLVGAATGAHSFEGSGFEYAKEMRNAYWEIALLPNLTNQQKRAPIRKLYDDPSQSSELLSEAKKLNDSQTREQKLISEEDLAKPTTTPAPRPPTPAPTIASQPLSLRPEACRPAAGGAVHTRGLDFACDIYIWAPLAGTCGVLLLSLVITLYCKRGRKKLLYIFKQPFMRPVQTTQEEDGCSCRFPEEEEGGCELRVKFSRSADAPAYQQGQNQLYNELNLGRREEYDVLDKRRGRDPEMGGKPRRKNPQEGLYNELQKDKMAEAYSEIGMKGERRRGKGHDGLYQGLSTATKDTYDALHMQALPPRSRGSGATNFSLLKQAGDVEENPGPGIHMATYEVLCEVARKLGTDDREVVLFLLNVFIPQPTLAQLIGALRALKEEGRLTFPLLAECLFRAGRRDLLRDLLHLDPRFLERHLAGTMSYFSPYQLTVLHVDGELCARDIRSLIFLSKDTIGSRSTPQTFLHWVYCMENLDLLGPTDVDALMSMLRSLSRVDLQRQVQTLMGLHLSGPSHSQHYRHTPLETDFYDYKDDDDKTSGSGEGRGSLLTCGDVEENPGPHMTEYKPTVRLATRDDVPRAVRTLAAAFADYPATRHTVDPDRHIERVTELQELFLTRVGLDIGKVWVADDGAAVAVWTTPESVEAGAVFAEIGPRMAELSGSRLAAQQQMEGLLAPHRPKEPAWFLATVGVSPDHQGKGLGSAVVLPGVEAAERAGVPAFLETSAPRNLPFYERLGFTVTADVEVPEGPRTWCMTRKPGA

SEQ ID NO: 3096 - protein, 838 aa, Artificial Sequence
  Synthetic Polypeptide
MALPVTALLLPLALLLHAARPDEFGSDLGIKLLFAAAKGQDDEVRILLAAGADVNAKDFEGYTPLHVAAYDGHLEIVEVLLKAGADVNAKDSQGRTPLHEAAYSGHLEIVEVLLKAGADVNAQDDAGETPADLAAAWGHEDIAEVLQKTREQKLISEEDLAKPTTTPAPRPPTPAPTIASQPLSLRPEACRPAAGGAVHTRGLDFACDIYIWAPLAGTCGVLLLSLVITLYCKRGRKKLLYIFKQPFMRPVQTTQEEDGCSCRFPEEEEGGCELRVKFSRSADAPAYQQGQNQLYNELNLGRREEYDVLDKRRGRDPEMGGKPRRKNPQEGLYNELQKDKMAEAYSEIGMKGERRRGKGHDGLYQGLSTATKDTYDALHMQALPPRSRGSGATNFSLLKQAGDVEENPGPGIHMATYEVLCEVARKLGTDDREVVLFLLNVFIPQPTLAQLIGALRALKEEGRLTFPLLAECLFRAGRRDLLRDLLHLDPRFLERHLAGTMSYFSPYQLTVLHVDGELCARDIRSLIFLSKDTIGSRSTPQTFLHWVYCMENLDLLGPTDVDALMSMLRSLSRVDLQRQVQTLMGLHLSGPSHSQHYRHTPLETDFYDYKDDDDKTSGSGEGRGSLLTCGDVEENPGPHMTEYKPTVRLATRDDVPRAVRTLAAAFADYPATRHTVDPDRHIERVTELQELFLTRVGLDIGKVWVADDGAAVAVWTTPESVEAGAVFAEIGPRMAELSGSRLAAQQQMEGLLAPHRPKEPAWFLATVGVSPDHQGKGLGSAVVLPGVEAAERAGVPAFLETSAPRNLPFYERLGFTVTADVEVPEGPRTWCMTRKPGA

SEQ ID NO: 3097 - protein, 837 aa, Artificial Sequence
  Synthetic Polypeptide
MDWIWRILFLVGAATGAHSFERSDLGKKLLEAARAGQDDEVRILMANGADVNAKDEYGLTPLYLATAHGHLEIVEVLLKNGADVNAVDAIGFTPLHLAAFIGHLEIAEVLLKHGADVNAQDKFGKTAFDISIGNGNEDLAEILQKLNTREQKLISEEDLAKPTTTPAPRPPTPAPTIASQPLSLRPEACRPAAGGAVHTRGLDFACDIYIWAPLAGTCGVLLLSLVITLYCKRGRKKLLYIFKQPFMRPVQTTQEEDGCSCRFPEEEEGGCELRVKFSRSADAPAYQQGQNQLYNELNLGRREEYDVLDKRRGRDPEMGGKPRRKNPQEGLYNELQKDKMAEAYSEIGMKGERRRGKGHDGLYQGLSTATKDTYDALHMQALPPRSRGSGATNFSLLKQAGDVEENPGPGIHMATYEVLCEVARKLGTDDREVVLFLLNVFIPQPTLAQLIGALRALKEEGRLTFPLLAECLFRAGRRDLLRDLLHLDPRFLERHLAGTMSYFSPYQLTVLHVDGELCARDIRSLIFLSKDTIGSRSTPQTFLHWVYCMENLDLLGPTDVDALMSMLRSLSRVDLQRQVQTLMGLHLSGPSHSQHYRHTPLETDFYDYKDDDDKTSGSGEGRGSLLTCGDVEENPGPHMTEYKPTVRLATRDDVPRAVRTLAAAFADYPATRHTVDPDRHIERVTELQELFLTRVGLDIGKVWVADDGAAVAVWTTPESVEAGAVFAEIGPRMAELSGSRLAAQQQMEGLLAPHRPKEPAWFLATVGVSPDHQGKGLGSAVVLPGVEAAERAGVPAFLETSAPRNLPFYERLGFTVTADVEVPEGPRTWCMTRKPGA

SEQ ID NO: 3098 - protein, 989 aa, Artificial Sequence
  Synthetic Polypeptide
MALPVTALLLPLALLLHAARPDEFEVQLVESGGGLVQAGGSLRLSCAASGITFSINTMGWYRQAPGKQRELVALISSIGDTYYADSVKGRFTISRDNAKNTVYLQMNSLKPEDTAVYYCKRFRTAAQGTDYWGQGTQVTVSSLEGGGGSGGGGSGGGGSGSGGSGSGGSGSGGSGSGGSFEVQLVESGGGLVQPGGSLRLSCAASGSIFGFNDMAWYRQAPGKQRELVALISRVGVTSSADSVKGRFTISRVNAKDTVYLQMNSLKPEDTAVYYCYMDQRLDGSTLAYWGQGTQVTVSSTREQKLISEEDLAKPTTTPAPRPPTPAPTIASQPLSLRPEACRPAAGGAVHTRGLDFACDIYIWAPLAGTCGVLLLSLVITLYCKRGRKKLLYIFKQPFMRPVQTTQEEDGCSCRFPEEEEGGCELRVKFSRSADAPAYQQGQNQLYNELNLGRREEYDVLDKRRGRDPEMGGKPRRKNPQEGLYNELQKDKMAEAYSEIGMKGERRRGKGHDGLYQGLSTATKDTYDALHMQALPPRSRGSGATNFSLLKQAGDVEENPGPGIHMATYEVLCEVARKLGTDDREVVLFLLNVFIPQPTLAQLIGALRALKEEGRLTFPLLAECLFRAGRRDLLRDLLHLDPRFLERHLAGTMSYFSPYQLTVLHVDGELCARDIRSLIFLSKDTIGSRSTPQTFLHWVYCMENLDLLGPTDVDALMSMLRSLSRVDLQRQVQTLMGLHLSGPSHSQHYRHTPLETDFYDYKDDDDKTSGSGEGRGSLLTCGDVEENPGPHMTEYKPTVRLATRDDVPRAVRTLAAAFADYPATRHTVDPDRHIERVTELQELFLTRVGLDIGKVWVADDGAAVAVWTTPESVEAGAVFAEIGPRMAELSGSRLAAQQQMEGLLAPHRPKEPAWFLATVGVSPDHQGKGLGSAVVLPGVEAAERAGVPAFLETSAPRNLPFYERLGFTVTADVEVPEGPRTWCMTRKPGA

SEQ ID NO: 3099 - protein, 953 aa, Artificial Sequence
  Synthetic Polypeptide
MALPVTALLLPLALLLHAARPDIQMTQSPSSLSASVGDRVTITCRASQDVNTAVAWYQQKPGKAPKLLIYSASFLESGVPSRFSGSRSGTDFTLTISSLQPEDFATYYCQQHYTTPPTFGQTKVEIKRGGGGSGGGGSGGGGSEVQLVESGGGLVQPGGSLRLSCAASGFNIKDTYIHWVRQAPGKGLEWVARIYPTNGYTRYADSVKGRFTISADTSKNTAYLQMNSLRAEDTAVYYCSRWGGDGFYAMDVWGQGTLVTVSSTREQKLISEEDLAKPTTTPAPRPPTPAPTIASQPLSLRPEACRPAAGGAVHTRGLDFACDIYIWAPLAGTCGVLLLSLVITLYCKRGRKKLLYIFKQPFMRPVQTTQEEDGCSCRFPEEEEGGCELRVKFSRSADAPAYQQGQNQLYNELNLGRREEYDVLDKRRGRDPEMGGKPRRKNPQEGLYNELQKDKMAEAYSEIGMKGERRRGKGHDGLYQGLSTATKDTYDALHMQALPPRSRGSGATNFSLLKQAGDVEENPGPGIHMATYEVLCEVARKLGTDDREVVLFLLNVFIPQPTLAQLIGALRALKEEGRLTFPLLAECLFRAGRRDLLRDLLHLDPRFLERHLAGTMSYFSPYQLTVLHVDGELCARDIRSLIFLSKDTIGSRSTPQTFLHWVYCMENLDLLGPTDVDALMSMLRSLSRVDLQRQVQTLMGLHLSGPSHSQHYRHTPLETDFYDYKDDDDKTSGSGEGRGSLLTCGDVEENPGPHMTEYKPTVRLATRDDVPRAVRTLAAAFADYPATRHTVDPDRHIERVTELQELFLTRVGLDIGKVWVADDGAAVAVWTTPESVEAGAVFAEIGPRMAELSGSRLAAQQQMEGLLAPHRPKEPAWFLATVGVSPDHQGKGLGSAVVLPGVEAAERAGVPAFLETSAPRNLPFYERLGFTVTADVEVPEGPRTWCMTRKPGA

SEQ ID NO: 3100 - protein, 832 aa, Artificial Sequence
  Synthetic Polypeptide
MALPVTALLLPLALLLHAARPDEFDVQLVESGGGLVQPGGSLRLSCAASGSIGGLNAMAWYRQAPGKERELVAGIFGVGSTRYADSVKGRFTISRDNSKNTVYLQMNSLRPEDTAVYYCRMSSVTRGSSDYWGQGTLVTVSSTREQKLISEEDLAKPTTTPAPRPPTPAPTIASQPLSLRPEACRPAAGGAVHTRGLDFACDIYIWAPLAGTCGVLLLSLVITLYCKRGRKKLLYIFKQPFMRPVQTTQEEDGCSCRFPEEEEGGCELRVKFSRSADAPAYQQGQNQLYNELNLGRREEYDVLDKRRGRDPEMGGKPRRKNPQEGLYNELQKDKMAEAYSEIGMKGERRRGKGHDGLYQGLSTATKDTYDALHMQALPPRSRGSGATNFSLLKQAGDVEENPGPGIHMATYEVLCEVARKLGTDDREVVLFLLNVFIPQPTLAQLIGALRALKEEGRLTFPLLAECLFRAGRRDLLRDLLHLDPRFLERHLAGTMSYFSPYQLTVLHVDGELCARDIRSLIFLSKDTIGSRSTPQTFLHWVYCMENLDLLGPTDVDALMSMLRSLSRVDLQRQVQTLMGLHLSGPSHSQHYRHTPLETDFYDYKDDDDKTSGSGEGRGSLLTCGDVEENPGPHMTEYKPTVRLATRDDVPRAVRTLAAAFADYPATRHTVDPDRHIERVTELQELFLTRVGLDIGKVWVADDGAAVAVWTTPESVEAGAVFAEIGPRMAELSGSRLAAQQQMEGLLAPHRPKEPAWFLATVGVSPDHQGKGLGSAVVLPGVEAAERAGVPAFLETSAPRNLPFYERLGFTVTADVEVPEGPRTWCMTRKPGA

SEQ ID NO: 3101 - protein, 772 aa, Artificial Sequence
  Synthetic Polypeptide
MALPVTALLLPLALLLHAARPDEFVDNKFNKERYSAYYEIWQLPNLNVRQKAAFIGSLQDDPSQSANLLAEAKKLNDAQAPKTREQKLISEEDLAKPTTTPAPRPPTPAPTIASQPLSLRPEACRPAAGGAVHTRGLDFACDIYIWAPLAGTCGVLLLSLVITLYCKRGRKKLLYIFKQPFMRPVQTTQEEDGCSCRFPEEEEGGCELRVKFSRSADAPAYQQGQNQLYNELNLGRREEYDVLDKRRGRDPEMGGKPRRKNPQEGLYNELQKDKMAEAYSEIGMKGERRRGKGHDGLYQGLSTATKDTYDALHMQALPPRSRGSGATNFSLLKQAGDVEENPGPGIHMATYEVLCEVARKLGTDDREVVLFLLNVFIPQPTLAQLIGALRALKEEGRLTFPLLAECLFRAGRRDLLRDLLHLDPRFLERHLAGTMSYFSPYQLTVLHVDGELCARDIRSLIFLSKDTIGSRSTPQTFLHWVYCMENLDLLGPTDVDALMSMLRSLSRVDLQRQVQTLMGLHLSGPSHSQHYRHTPLETDFYDYKDDDDKTSGSGEGRGSLLTCGDVEENPGPHMTEYKPTVRLATRDDVPRAVRTLAAAFADYPATRHTVDPDRHIERVTELQELFLTRVGLDIGKVWVADDGAAVAVWTTPESVEAGAVFAEIGPRMAELSGSRLAAQQQMEGLLAPHRPKEPAWFLATVGVSPDHQGKGLGSAVVLPGVEAAERAGVPAFLETSAPRNLPFYERLGFTVTADVEVPEGPRTWCMTRKPGA

SEQ ID NO: 3102 - protein, 994 aa, Artificial Sequence
  Synthetic Polypeptide
MALPVTALLLPLALLLHAARPDEFDVQLVESGGGLVQPGGSLRLSCAASGSIGGLNAMAWYRQAPGKERELVAGIFGVGSTRYADSVKGRFTISRDNSKNTVYLQMNSLRPEDTAVYYCRMSSVTRGSSDYWGQGTLVTVSSLEGGGGSGGGGSGGGGSGSGGSGSGGSGSGGSGSGGSFEVQLVESGGSLVQPGGSLRLSCAASGFTFDDYAMSWVRQVPGKGLEWVSSINWSGTHTDYADSVKGRFTISRNNANNTLYLQMNSLKSEDTAVYYCAKNWRDAGTTWFEKSGSAGQGTQVTVSSTREQKLISEEDLAKPTTTPAPRPPTPAPTIASQPLSLRPEACRPAAGGAVHTRGLDFACDIYIWAPLAGTCGVLLLSLVITLYCKRGRKKLLYIFKQPFMRPVQTTQEEDGCSCRFPEEEEGGCELRVKFSRSADAPAYQQGQNQLYNELNLGRREEYDVLDKRRGRDPEMGGKPRRKNPQEGLYNELQKDKMAEAYSEIGMKGERRRGKGHDGLYQGLSTATKDTYDALHMQALPPRSRGSGATNFSLLKQAGDVEENPGPGIHMATYEVLCEVARKLGTDDREVVLFLLNVFIPQPTLAQLIGALRALKEEGRLTFPLLAECLFRAGRRDLLRDLLHLDPRFLERHLAGTMSYFSPYQLTVLHVDGELCARDIRSLIFLSKDTIGSRSTPQTFLHWVYCMENLDLLGPTDVDALMSMLRSLSRVDLQRQVQTLMGLHLSGPSHSQHYRHTPLETDFYDYKDDDDKTSGSGEGRGSLLTCGDVEENPGPHMTEYKPTVRLATRDDVPRAVRTLAAAFADYPATRHTVDPDRHIERVTELQELFLTRVGLDIGKVWVADDGAAVAVWTTPESVEAGAVFAEIGPRMAELSGSRLAAQQQMEGLLAPHRPKEPAWFLATVGVSPDHQGKGLGSAVVLPGVEAAERAGVPAFLETSAPRNLPFYERLGFTVTADVEVPEGPRTWCMTRKPGA

SEQ ID NO: 3103 - protein, 952 aa, Artificial Sequence
  Synthetic Polypeptide
MALPVTALLLPLALLLHAARPDQSVLTQPPSVSVAPGKTARIPCEGNYIGSSNVHWYQQKPGQAPVLVIHFDSDRPSGIPDRFSGSNSGNMATLTISRVEAGDEADYYCQVWENHGWVFGGGTKLTVLSGGGGSGGGGSGGGGSEVQLVETGGGLVQPGESLRLSCAASGFTFSDYEMNWVRQAPGKGLEWVSYISSSGSTIYYADSVKGRFTIYRDNAKNSLYLQMNSLRAEDTALYYCARAWGVGPPDYWGQGTLVTVSSTREQKLISEEDLAKPTTTPAPRPPTPAPTIASQPLSLRPEACRPAAGGAVHTRGLDFACDIYIWAPLAGTCGVLLLSLVITLYCKRGRKKLLYIFKQPFMRPVQTTQEEDGCSCRFPEEEEGGCELRVKFSRSADAPAYQQGQNQLYNELNLGRREEYDVLDKRRGRDPEMGGKPRRKNPQEGLYNELQKDKMAEAYSEIGMKGERRRGKGHDGLYQGLSTATKDTYDALHMQALPPRSRGSGATNFSLLKQAGDVEENPGPGIHMATYEVLCEVARKLGTDDREVVLFLLNVFIPQPTLAQLIGALRALKEEGRLTFPLLAECLFRAGRRDLLRDLLHLDPRFLERHLAGTMSYFSPYQLTVLHVDGELCARDIRSLIFLSKDTIGSRSTPQTFLHWVYCMENLDLLGPTDVDALMSMLRSLSRVDLQRQVQTLMGLHLSGPSHSQHYRHTPLETDFYDYKDDDDKTSGSGEGRGSLLTCGDVEENPGPHMTEYKPTVRLATRDDVPRAVRTLAAAFADYPATRHTVDPDRHIERVTELQELFLTRVGLDIGKVWVADDGAAVAVWTTPESVEAGAVFAEIGPRMAELSGSRLAAQQQMEGLLAPHRPKEPAWFLATVGVSPDHQGKGLGSAVVLPGVEAAERAGVPAFLETSAPRNLPFYERLGFTVTADVEVPEGPRTWCMTRKPGA

SEQ ID NO: 3104 - protein, 960 aa, Artificial Sequence
  Synthetic Polypeptide
MALPVTALLLPLALLLHAARPDIQMTQSPSSLSASVGDTVTITCQANGYLNWYQQRRGKAPKLLIYDGSKLERGVPSRFSGRRWGQEYNLTINNLQPEDIATYFCQVYEFVVPGTRLDLKRTVAAPGGGGSGGGGSGGGGSQVQLLQSGAAVTKPGASVRVSCEASGYNIRDYFIHWWRQAPGQGLQWVGWINPKTGQPNNPRQFQGRVSLTRHASWDFDTFSFYMDLKALRSDDTAVYFCARQRSDYWDFDVWGSGTQVTVSSASTKGPTREQKLISEEDLAKPTTTPAPRPPTPAPTIASQPLSLRPEACRPAAGGAVHTRGLDFACDIYIWAPLAGTCGVLLLSLVITLYCKRGRKKLLYIFKQPFMRPVQTTQEEDGCSCRFPEEEEGGCELRVKFSRSADAPAYQQGQNQLYNELNLGRREEYDVLDKRRGRDPEMGGKPRRKNPQEGLYNELQKDKMAEAYSEIGMKGERRRGKGHDGLYQGLSTATKDTYDALHMQALPPRSRGSGATNFSLLKQAGDVEENPGPGIHMATYEVLCEVARKLGTDDREVVLFLLNVFIPQPTLAQLIGALRALKEEGRLTFPLLAECLFRAGRRDLLRDLLHLDPRFLERHLAGTMSYFSPYQLTVLHVDGELCARDIRSLIFLSKDTIGSRSTPQTFLHWVYCMENLDLLGPTDVDALMSMLRSLSRVDLQRQVQTLMGLHLSGPSHSQHYRHTPLETDFYDYKDDDDKTSGSGEGRGSLLTCGDVEENPGPHMTEYKPTVRLATRDDVPRAVRTLAAAFADYPATRHTVDPDRHIERVTELQELFLTRVGLDIGKVWVADDGAAVAVWTTPESVEAGAVFAEIGPRMAELSGSRLAAQQQMEGLLAPHRPKEPAWFLATVGVSPDHQGKGLGSAVVLPGVEAAERAGVPAFLETSAPRNLPFYERLGFTVTADVEVPEGPRTWCMTRKPGA

SEQ ID NO: 3105 - protein, 966 aa, Artificial Sequence
  Synthetic Polypeptide
MALPVTALLLPLALLLHAARPQSALTQPPSASGSPGQSITISCTGTSNNFVSWYQQHAGKAPKLVIYDVNKRPSGVPDRFSGSKSGNTASLTVSGLQTDDEAVYYCGSLVGNWDVIFGGGTKLTVLGGGGSGGGGSGGGGSQPQLQESGPTLVEASETLSLTCAVSGDSTAACNSFWGWVRQPPGKGLEWVGSLSHCASYWNRGWTYHNPSLKSRLTLALDTPKNLVFLKLNSVTAADTATYYCARFGGEVLRYTDWPKPAWVDLWGRGTLVTVSSTREQKLISEEDLAKPTTTPAPRPPTPAPTIASQPLSLRPEACRPAAGGAVHTRGLDFACDIYIWAPLAGTCGVLLLSLVITLYCKRGRKKLLYIFKQPFMRPVQTTQEEDGCSCRFPEEEEGGCELRVKFSRSADAPAYQQGQNQLYNELNLGRREEYDVLDKRRGRDPEMGGKPRRKNPQEGLYNELQKDKMAEAYSEIGMKGERRRGKGHDGLYQGLSTATKDTYDALHMQALPPRSRGSGATNFSLLKQAGDVEENPGPGIHMATYEVLCEVARKLGTDDREVVLFLLNVFIPQPTLAQLIGALRALKEEGRLTFPLLAECLFRAGRRDLLRDLLHLDPRFLERHLAGTMSYFSPYQLTVLHVDGELCARDIRSLIFLSKDTIGSRSTPQTFLHWVYCMENLDLLGPTDVDALMSMLRSLSRVDLQRQVQTLMGLHLSGPSHSQHYRHTPLETDFYDYKDDDDKTSGSGEGRGSLLTCGDVEENPGPHMTEYKPTVRLATRDDVPRAVRTLAAAFADYPATRHTVDPDRHIERVTELQELFLTRVGLDIGKVWVADDGAAVAVWTTPESVEAGAVFAEIGPRMAELSGSRLAAQQQMEGLLAPHRPKEPAWFLATVGVSPDHQGKGLGSAVVLPGVEAAERAGVPAFLETSAPRNLPFYERLGFTVTADVEVPEGPRTWCMTRKPGA

SEQ ID NO: 3106 - protein, 951 aa, Artificial Sequence
  Synthetic Polypeptide
MALPVTALLLPLALLLHAARPEIVLTQSPGTLSLSPGETAIISCRTSQYGSLAWYQQRPGQAPRLVIYSGSTRAAGIPDRFSGSRWGPDYNLTISNLESGDFGVYYCQQYEFFGQGTKVQVDIKRGGGGSGGGGSGGGGSQVQLVQSGGQMKKPGESMRISCRASGYEFIDCTLNWIRLAPGKRPEWMGWLKPRGGAVNYARPLQGRVTMTRDVYSDTAFLELRSLTVDDTAVYFCTRGKNCDYNWDFEHWGRGTPVIVSSTREQKLISEEDLAKPTTTPAPRPPTPAPTIASQPLSLRPEACRPAAGGAVHTRGLDFACDIYIWAPLAGTCGVLLLSLVITLYCKRGRKKLLYIFKQPFMRPVQTTQEEDGCSCRFPEEEEGGCELRVKFSRSADAPAYQQGQNQLYNELNLGRREEYDVLDKRRGRDPEMGGKPRRKNPQEGLYNELQKDKMAEAYSEIGMKGERRRGKGHDGLYQGLSTATKDTYDALHMQALPPRSRGSGATNFSLLKQAGDVEENPGPGIHMATYEVLCEVARKLGTDDREVVLFLLNVFIPQPTLAQLIGALRALKEEGRLTFPLLAECLFRAGRRDLLRDLLHLDPRFLERHLAGTMSYFSPYQLTVLHVDGELCARDIRSLIFLSKDTIGSRSTPQTFLHWVYCMENLDLLGPTDVDALMSMLRSLSRVDLQRQVQTLMGLHLSGPSHSQHYRHTPLETDFYDYKDDDDKTSGSGEGRGSLLTCGDVEENPGPHMTEYKPTVRLATRDDVPRAVRTLAAAFADYPATRHTVDPDRHIERVTELQELFLTRVGLDIGKVWVADDGAAVAVWTTPESVEAGAVFAEIGPRMAELSGSRLAAQQQMEGLLAPHRPKEPAWFLATVGVSPDHQGKGLGSAVVLPGVEAAERAGVPAFLETSAPRNLPFYERLGFTVTADVEVPEGPRTWCMTRKPGA

SEQ ID NO: 3107 - protein, 961 aa, Artificial Sequence
  Synthetic Polypeptide
MALPVTALLLPLALLLHAARPELVLTQSPGTLSLSAGERATLSCRASQSVSSGSLAWYQQKPGQAPRLLIYGASTRATGIPDRFSGSGSGTDFTLTIGRLEPEDLAVYYCQQYGTSPYTFGQGTKLEIGGGGSGGGGSGGGGSLEQSGAEVKKPGSSVQVSCKASGGTFSMYGFNWVRQAPGHGLEWMGGIIPIFGTSNYAQKFRGRVTFTADQATSTAYMELTNLRSDDTAVYYCARDFGPDWEDGDSYDGSGRGFFDFWGQGTLVTVSSTREQKLISEEDLAKPTTTPAPRPPTPAPTIASQPLSLRPEACRPAAGGAVHTRGLDFACDIYIWAPLAGTCGVLLLSLVITLYCKRGRKKLLYIFKQPFMRPVQTTQEEDGCSCRFPEEEEGGCELRVKFSRSADAPAYQQGQNQLYNELNLGRREEYDVLDKRRGRDPEMGGKPRRKNPQEGLYNELQKDKMAEAYSEIGMKGERRRGKGHDGLYQGLSTATKDTYDALHMQALPPRSRGSGATNFSLLKQAGDVEENPGPGIHMATYEVLCEVARKLGTDDREVVLFLLNVFIPQPTLAQLIGALRALKEEGRLTFPLLAECLFRAGRRDLLRDLLHLDPRFLERHLAGTMSYFSPYQLTVLHVDGELCARDIRSLIFLSKDTIGSRSTPQTFLHWVYCMENLDLLGPTDVDALMSMLRSLSRVDLQRQVQTLMGLHLSGPSHSQHYRHTPLETDFYDYKDDDDKTSGSGEGRGSLLTCGDVEENPGPHMTEYKPTVRLATRDDVPRAVRTLAAAFADYPATRHTVDPDRHIERVTELQELFLTRVGLDIGKVWVADDGAAVAVWTTPESVEAGAVFAEIGPRMAELSGSRLAAQQQMEGLLAPHRPKEPAWFLATVGVSPDHQGKGLGSAVVLPGVEAAERAGVPAFLETSAPRNLPFYERLGFTVTADVEVPEGPRTWCMTRKPGA

SEQ ID NO: 3108 - protein, 957 aa, Artificial Sequence
  Synthetic Polypeptide
MALPVTALLLPLALLLHAARPDVVMTQSPSSLSASVGDRVTITCQSSLDISHYLNWYQQKPGKAPKLLIYDASNLETGVPSRFSGSGSGTHFTFTISSLQPEDFATYYCQQYDNLPLTFGGGTKLEIKRGGGGSGGGGSGGGGSQVQLVQSGGGVVQPGGSLRVSCAASGVTLSDYGMHWVRQAPGKGLEWVAFIRNDGSDKYYADSVKGRFTISRDNSEKTVSLQMSSLRAEDTAVYYCAKNGESGPLDYWYLDLWGRGTLVTVSSTREQKLISEEDLAKPTTTPAPRPPTPAPTIASQPLSLRPEACRPAAGGAVHTRGLDFACDIYIWAPLAGTCGVLLLSLVITLYCKRGRKKLLYIFKQPFMRPVQTTQEEDGCSCRFPEEEEGGCELRVKFSRSADAPAYQQGQNQLYNELNLGRREEYDVLDKRRGRDPEMGGKPRRKNPQEGLYNELQKDKMAEAYSEIGMKGERRRGKGHDGLYQGLSTATKDTYDALHMQALPPRSRGSGATNFSLLKQAGDVEENPGPGIHMATYEVLCEVARKLGTDDREVVLFLLNVFIPQPTLAQLIGALRALKEEGRLTFPLLAECLFRAGRRDLLRDLLHLDPRFLERHLAGTMSYFSPYQLTVLHVDGELCARDIRSLIFLSKDTIGSRSTPQTFLHWVYCMENLDLLGPTDVDALMSMLRSLSRVDLQRQVQTLMGLHLSGPSHSQHYRHTPLETDFYDYKDDDDKTSGSGEGRGSLLTCGDVEENPGPHMTEYKPTVRLATRDDVPRAVRTLAAAFADYPATRHTVDPDRHIERVTELQELFLTRVGLDIGKVWVADDGAAVAVWTTPESVEAGAVFAEIGPRMAELSGSRLAAQQQMEGLLAPHRPKEPAWFLATVGVSPDHQGKGLGSAVVLPGVEAAERAGVPAFLETSAPRNLPFYERLGFTVTADVEVPEGPRTWCMTRKPGA

SEQ ID NO: 3109 - protein, 957 aa, Artificial Sequence
  Synthetic Polypeptide
MALPVTALLLPLALLLHAARPDDIVMTQSQDSMATSVGERVTVNCKASQNVDTNVAWYQQKPGQSPEPLLFSASYRYTGVPDRFSGSGSGTDFTLTISSVQAEDVAEYFCQQYNSYPLTFGQGTKLEIKRGGGGSGGGGSGGGGSEVQVEVSGGGLVQPGGSMRLSCAVSGFTFSNYWMNWVRQSPEKGLEWIAEIRLKSNNFARYYAESVKGRFTISRDNSKNSLYLQMISLRAEDTAIYYCTSYGNYVGHYFDHWGQGTLLTVSSTREQKLISEEDLAKPTTTPAPRPPTPAPTIASQPLSLRPEACRPAAGGAVHTRGLDFACDIYIWAPLAGTCGVLLLSLVITLYCKRGRKKLLYIFKQPFMRPVQTTQEEDGCSCRFPEEEEGGCELRVKFSRSADAPAYQQGQNQLYNELNLGRREEYDVLDKRRGRDPEMGGKPRRKNPQEGLYNELQKDKMAEAYSEIGMKGERRRGKGHDGLYQGLSTATKDTYDALHMQALPPRSRGSGATNFSLLKQAGDVEENPGPGIHMATYEVLCEVARKLGTDDREVVLFLLNVFIPQPTLAQLIGALRALKEEGRLTFPLLAECLFRAGRRDLLRDLLHLDPRFLERHLAGTMSYFSPYQLTVLHVDGELCARDIRSLIFLSKDTIGSRSTPQTFLHWVYCMENLDLLGPTDVDALMSMLRSLSRVDLQRQVQTLMGLHLSGPSHSQHYRHTPLETDFYDYKDDDDKTSGSGEGRGSLLTCGDVEENPGPHMTEYKPTVRLATRDDVPRAVRTLAAAFADYPATRHTVDPDRHIERVTELQELFLTRVGLDIGKVWVADDGAAVAVWTTPESVEAGAVFAEIGPRMAELSGSRLAAQQQMEGLLAPHRPKEPAWFLATVGVSPDHQGKGLGSAVVLPGVEAAERAGVPAFLETSAPRNLPFYERLGFTVTADVEVPEGPRTWCMTRKPGA

SEQ ID NO: 3110 - protein, 961 aa, Artificial Sequence
  Synthetic Polypeptide
MALPVTALLLPLALLLHAARPSYELTQPPSVSGTPGQRVAISCSGSSSNIGTRMVTWYQHVPGTAPKLLIFNNNQRPSGVPDRFSASKSGTSASLAIIGLQSDDEADYYCATWDDNVKSYVFGTGTKVTVLGSRGGGGSGGGGSGGGGSLEMAQVQLQQWGAGLLKPSETLSLTCAVYGGSFSGYYWSWIRQPPGKGLEWIGEINHSGSTNYNPSLKSRVTISVDTSKNQFSLKLSSVTAADTAVYYCARAPQSWYVGDVWGQGTLVTVSSTREQKLISEEDLAKPTTTPAPRPPTPAPTIASQPLSLRPEACRPAAGGAVHTRGLDFACDIYIWAPLAGTCGVLLLSLVITLYCKRGRKKLLYIFKQPFMRPVQTTQEEDGCSCRFPEEEEGGCELRVKFSRSADAPAYQQGQNQLYNELNLGRREEYDVLDKRRGRDPEMGGKPRRKNPQEGLYNELQKDKMAEAYSEIGMKGERRRGKGHDGLYQGLSTATKDTYDALHMQALPPRSRGSGATNFSLLKQAGDVEENPGPGIHMATYEVLCEVARKLGTDDREVVLFLLNVFIPQPTLAQLIGALRALKEEGRLTFPLLAECLFRAGRRDLLRDLLHLDPRFLERHLAGTMSYFSPYQLTVLHVDGELCARDIRSLIFLSKDTIGSRSTPQTFLHWVYCMENLDLLGPTDVDALMSMLRSLSRVDLQRQVQTLMGLHLSGPSHSQHYRHTPLETDFYDYKDDDDKTSGSGEGRGSLLTCGDVEENPGPHMTEYKPTVRLATRDDVPRAVRTLAAAFADYPATRHTVDPDRHIERVTELQELFLTRVGLDIGKVWVADDGAAVAVWTTPESVEAGAVFAEIGPRMAELSGSRLAAQQQMEGLLAPHRPKEPAWFLATVGVSPDHQGKGLGSAVVLPGVEAAERAGVPAFLETSAPRNLPFYERLGFTVTADVEVPEGPRTWCMTRKPGA

SEQ ID NO: 3111 - protein, 958 aa, Artificial Sequence
  Synthetic Polypeptide
MALPVTALLLPLALLLHAARPQSVLTQPPSLSVAPGKTASITCGGNNIGMKSVHWYQQRPGQAPVLVIYYDSDRPSGIPGRFSGSNSGNTATLTISRVEAGDEADYYCQVWDTTGDHPGYVFGTGTKVTVLGGGGSGGGGSGGGGSQVQLVQSGAEVKKPGSSVKVSCKASGGTFSSYAISWVRQAPGQGLEWMGGIIPIFGTANYAQKFQGRVTITADESTSTAYMELSSLRSEDTAVYYCARGVYGYSGSAPYDEWGQGTLVTVSSTREQKLISEEDLAKPTTTPAPRPPTPAPTIASQPLSLRPEACRPAAGGAVHTRGLDFACDIYIWAPLAGTCGVLLLSLVITLYCKRGRKKLLYIFKQPFMRPVQTTQEEDGCSCRFPEEEEGGCELRVKFSRSADAPAYQQGQNQLYNELNLGRREEYDVLDKRRGRDPEMGGKPRRKNPQEGLYNELQKDKMAEAYSEIGMKGERRRGKGHDGLYQGLSTATKDTYDALHMQALPPRSRGSGATNFSLLKQAGDVEENPGPGIHMATYEVLCEVARKLGTDDREVVLFLLNVFIPQPTLAQLIGALRALKEEGRLTFPLLAECLFRAGRRDLLRDLLHLDPRFLERHLAGTMSYFSPYQLTVLHVDGELCARDIRSLIFLSKDTIGSRSTPQTFLHWVYCMENLDLLGPTDVDALMSMLRSLSRVDLQRQVQTLMGLHLSGPSHSQHYRHTPLETDFYDYKDDDDKTSGSGEGRGSLLTCGDVEENPGPHMTEYKPTVRLATRDDVPRAVRTLAAAFADYPATRHTVDPDRHIERVTELQELFLTRVGLDIGKVWVADDGAAVAVWTTPESVEAGAVFAEIGPRMAELSGSRLAAQQQMEGLLAPHRPKEPAWFLATVGVSPDHQGKGLGSAVVLPGVEAAERAGVPAFLETSAPRNLPFYERLGFTVTADVEVPEGPRTWCMTRKPGA

SEQ ID NO: 3112 - protein, 964 aa, Artificial Sequence
  Synthetic Polypeptide
MALPVTALLLPLALLLHAARPDEIVLTQSPLSLPVTPGEPASISCRSSQSLLHSNGYNYLDWYLQKPGQSPQLLIYLGSNRASGVPDRFSGSGSGTDFTLKISRVEAEDVGVYYCMQALQTPRTFGQGTKVEIKRGGGGSGGGGSGGGGSQVQLVQSGGGVVQPGRSLRLSCAASGFTFSSYGMHWVRQAPGKGLEWVAVISYDGSNKYYADSVKGRFTISRDNSKNTLYLQMNSLRAEDTAVYYCARDFDYGDSYYYYGMDVWGQGTTVTVSSTREQKLISEEDLAKPTTTPAPRPPTPAPTIASQPLSLRPEACRPAAGGAVHTRGLDFACDIYIWAPLAGTCGVLLLSLVITLYCKRGRKKLLYIFKQPFMRPVQTTQEEDGCSCRFPEEEEGGCELRVKFSRSADAPAYQQGQNQLYNELNLGRREEYDVLDKRRGRDPEMGGKPRRKNPQEGLYNELQKDKMAEAYSEIGMKGERRRGKGHDGLYQGLSTATKDTYDALHMQALPPRSRGSGATNFSLLKQAGDVEENPGPGIHMATYEVLCEVARKLGTDDREVVLFLLNVFIPQPTLAQLIGALRALKEEGRLTFPLLAECLFRAGRRDLLRDLLHLDPRFLERHLAGTMSYFSPYQLTVLHVDGELCARDIRSLIFLSKDTIGSRSTPQTFLHWVYCMENLDLLGPTDVDALMSMLRSLSRVDLQRQVQTLMGLHLSGPSHSQHYRHTPLETDFYDYKDDDDKTSGSGEGRGSLLTCGDVEENPGPHMTEYKPTVRLATRDDVPRAVRTLAAAFADYPATRHTVDPDRHIERVTELQELFLTRVGLDIGKVWVADDGAAVAVWTTPESVEAGAVFAEIGPRMAELSGSRLAAQQQMEGLLAPHRPKEPAWFLATVGVSPDHQGKGLGSAVVLPGVEAAERAGVPAFLETSAPRNLPFYERLGFTVTADVEVPEGPRTWCMTRKPGA

SEQ ID NO: 3113 - protein, 958 aa, Artificial Sequence
  Synthetic Polypeptide
MALPVTALLLPLALLLHAARPDEIVLTQSPATLSLSPGERATLSCRASQSVGSYLAWYQQKPGAPRLLIYDASHRATGIPARFSGSGSGTDFTLTISSLEPEDFAVYYCQQRSNWPPMYTFGQGTKLEIKRGGGGSGGGGSGGGGSEVQLVQSGAEVSVKVSCKASGGKKPGSTFSSYTISWVRQAPGQGLEWMGGIIPIFGTANYAQKFQGRVTITADKSTSTAYMELSSLRSEDTAVYYCAGDTDSSGYYGAVDYWGQGTLVTVSSTREQKLISEEDLAKPTTTPAPRPPTPAPTIASQPLSLRPEACRPAAGGAVHTRGLDFACDIYIWAPLAGTCGVLLLSLVITLYCKRGRKKLLYIFKQPFMRPVQTTQEEDGCSCRFPEEEEGGCELRVKFSRSADAPAYQQGQNQLYNELNLGRREEYDVLDKRRGRDPEMGGKPRRKNPQEGLYNELQKDKMAEAYSEIGMKGERRRGKGHDGLYQGLSTATKDTYDALHMQALPPRSRGSGATNFSLLKQAGDVEENPGPGIHMATYEVLCEVARKLGTDDREVVLFLLNVFIPQPTLAQLIGALRALKEEGRLTFPLLAECLFRAGRRDLLRDLLHLDPRFLERHLAGTMSYFSPYQLTVLHVDGELCARDIRSLIFLSKDTIGSRSTPQTFLHWVYCMENLDLLGPTDVDALMSMLRSLSRVDLQRQVQTLMGLHLSGPSHSQHYRHTPLETDFYDYKDDDDKTSGSGEGRGSLLTCGDVEENPGPHMTEYKPTVRLATRDDVPRAVRTLAAAFADYPATRHTVDPDRHIERVTELQELFLTRVGLDIGKVWVADDGAAVAVWTTPESVEAGAVFAEIGPRMAELSGSRLAAQQQMEGLLAPHRPKEPAWFLATVGVSPDHQGKGLGSAVVLPGVEAAERAGVPAFLETSAPRNLPFYERLGFTVTADVEVPEGPRTWCMTRKPGA

SEQ ID NO: 3114 - protein, 941 aa, Artificial Sequence
  Synthetic Polypeptide
MALPVTALLLPLALLLHAARPDIQMTQSPSSLSASVGDRVTITCQASQDINNYLNWYQQKPGKAPKLLIYDASNLQTGVPSRFSGSGSGTDFTFTIEDIATYYCQQYTFGPGTKVDIKGGGGSGGGGSGGGGSEVQLLESGGGLVQPGGSLRLSCAASGFTFSWYSMTWVRQAPGKGLEWVSSIVPWGDFTQYADSVKGRFTISRDNSKNTLYLQMNSLRAEDTAVYYCAKGPGWGSFDLWGRGTLVTVSSTREQKLISEEDLAKPTTTPAPRPPTPAPTIASQPLSLRPEACRPAAGGAVHTRGLDFACDIYIWAPLAGTCGVLLLSLVITLYCKRGRKKLLYIFKQPFMRPVQTTQEEDGCSCRFPEEEEGGCELRVKFSRSADAPAYQQGQNQLYNELNLGRREEYDVLDKRRGRDPEMGGKPRRKNPQEGLYNELQKDKMAEAYSEIGMKGERRRGKGHDGLYQGLSTATKDTYDALHMQALPPRSRGSGATNFSLLKQAGDVEENPGPGIHMATYEVLCEVARKLGTDDREVVLFLLNVFIPQPTLAQLIGALRALKEEGRLTFPLLAECLFRAGRRDLLRDLLHLDPRFLERHLAGTMSYFSPYQLTVLHVDGELCARDIRSLIFLSKDTIGSRSTPQTFLHWVYCMENLDLLGPTDVDALMSMLRSLSRVDLQRQVQTLMGLHLSGPSHSQHYRHTPLETDFYDYKDDDDKTSGSGEGRGSLLTCGDVEENPGPHMTEYKPTVRLATRDDVPRAVRTLAAAFADYPATRHTVDPDRHIERVTELQELFLTRVGLDIGKVWVADDGAAVAVWTTPESVEAGAVFAEIGPRMAELSGSRLAAQQQMEGLLAPHRPKEPAWFLATVGVSPDHQGKGLGSAVVLPGVEAAERAGVPAFLETSAPRNLPFYERLGFTVTADVEVPEGPRTWCMTRKPGA

SEQ ID NO: 3115 - protein, 830 aa, Artificial Sequence
  Synthetic Polypeptide
MDWIWRILFLVGAATGAHSEVQLVESGGGLVQPGGSLRLSCAASGSVFKINVMAWYRQAPGKGRELVAGIISGGSTSYADSVKGRFTISRDNAKNTLYLQMNSLRPEDTAVYYCAFITTESDYDLGRRYWGQGTLVTVSSTREQKLISEEDLAKPTTTPAPRPPTPAPTIASQPLSLRPEACRPAAGGAVHTRGLDFACDIYIWAPLAGTCGVLLLSLVITLYCKRGRKKLLYIFKQPFMRPVQTTQEEDGCSCRFPEEEEGGCELRVKFSRSADAPAYQQGQNQLYNELNLGRREEYDVLDKRRGRDPEMGGKPRRKNPQEGLYNELQKDKMAEAYSEIGMKGERRRGKGHDGLYQGLSTATKDTYDALHMQALPPRSRGSGATNFSLLKQAGDVEENPGPGIHMATYEVLCEVARKLGTDDREVVLFLLNVFIPQPTLAQLIGALRALKEEGRLTFPLLAECLFRAGRRDLLRDLLHLDPRFLERHLAGTMSYFSPYQLTVLHVDGELCARDIRSLIFLSKDTIGSRSTPQTFLHWVYCMENLDLLGPTDVDALMSMLRSLSRVDLQRQVQTLMGLHLSGPSHSQHYRHTPLETDFYDYKDDDDKTSGSGEGRGSLLTCGDVEENPGPHMTEYKPTVRLATRDDVPRAVRTLAAAFADYPATRHTVDPDRHIERVTELQELFLTRVGLDIGKVWVADDGAAVAVWTTPESVEAGAVFAEIGPRMAELSGSRLAAQQQMEGLLAPHRPKEPAWFLATVGVSPDHQGKGLGSAVVLPGVEAAERAGVPAFLETSAPRNLPFYERLGFTVTADVEVPEGPRTWCMTRKPGA

SEQ ID NO: 3116 - protein, 951 aa, Artificial Sequence
  Synthetic Polypeptide
MALPVTALLLPLALLLHAARPDIQMTQSPSSLSASVGDRVTITCTASLSVSSTYLHWYQQKPGSSPKLWIYSTSNLASGVPSRFSGSGSGTSYTLTISSLQPEDFATYYCHQYHRSPLTFGGGTKVEIKRGGGGSGGGGSGGGGSEVQLVESGGGLVQPGGSLRLSCAASGFSLTKYGVHWVRQAPGKGLEWVGVKWAGGSTDYNSALMSRFTISKDNAKNSLYLQMNSLRAEDTAVYYCARDHRDAMDYWGQGTLVTVSSTREQKLISEEDLAKPTTTPAPRPPTPAPTIASQPLSLRPEACRPAAGGAVHTRGLDFACDIYIWAPLAGTCGVLLLSLVITLYCKRGRKKLLYIFKQPFMRPVQTTQEEDGCSCRFPEEEEGGCELRVKFSRSADAPAYQQGQNQLYNELNLGRREEYDVLDKRRGRDPEMGGKPRRKNPQEGLYNELQKDKMAEAYSEIGMKGERRRGKGHDGLYQGLSTATKDTYDALHMQALPPRSRGSGATNFSLLKQAGDVEENPGPGIHMATYEVLCEVARKLGTDDREVVLFLLNVFIPQPTLAQLIGALRALKEEGRLTFPLLAECLFRAGRRDLLRDLLHLDPRFLERHLAGTMSYFSPYQLTVLHVDGELCARDIRSLIFLSKDTIGSRSTPQTFLHWVYCMENLDLLGPTDVDALMSMLRSLSRVDLQRQVQTLMGLHLSGPSHSQHYRHTPLETDFYDYKDDDDKTSGSGEGRGSLLTCGDVEENPGPHMTEYKPTVRLATRDDVPRAVRTLAAAFADYPATRHTVDPDRHIERVTELQELFLTRVGLDIGKVWVADDGAAVAVWTTPESVEAGAVFAEIGPRMAELSGSRLAAQQQMEGLLAPHRPKEPAWFLATVGVSPDHQGKGLGSAVVLPGVEAAERAGVPAFLETSAPRNLPFYERLGFTVTADVEVPEGPRTWCMTRKPGA

SEQ ID NO: 3117 - protein, 955 aa, Artificial Sequence
  Synthetic Polypeptide
MALPVTALLLPLALLLHAARPDIQMTQSPSSLSASVGDRVTITCKASQDVGTAVAWYQQKPGKAPKLLIYSASYRSTGVPSRFSGSGSGTDFTLTISSLQPEDFATYYCQHHYSAPWTFGGGTKVEIKGGGGSGGGGSGGGGSEVQLVESGGGLVQPGGSLRLSCAASGFTFSRNGMSWVRQAPGKGLEWVATVSSGGSYIYYADSVKGRFTISRDNAKNSLYLQMNSLRAEDTAVYYCARQGTTALATRFFDVWGQGTLVTVSSTREQKLISEEDLAKPTTTPAPRPPTPAPTIASQPLSLRPEACRPAAGGAVHTRGLDFACDIYIWAPLAGTCGVLLLSLVITLYCKRGRKKLLYIFKQPFMRPVQTTQEEDGCSCRFPEEEEGGCELRVKFSRSADAPAYQQGQNQLYNELNLGRREEYDVLDKRRGRDPEMGGKPRRKNPQEGLYNELQKDKMAEAYSEIGMKGERRRGKGHDGLYQGLSTATKDTYDALHMQALPPRSRGSGATNFSLLKQAGDVEENPGPGIHMATYEVLCEVARKLGTDDREVVLFLLNVFIPQPTLAQLIGALRALKEEGRLTFPLLAECLFRAGRRDLLRDLLHLDPRFLERHLAGTMSYFSPYQLTVLHVDGELCARDIRSLIFLSKDTIGSRSTPQTFLHWVYCMENLDLLGPTDVDALMSMLRSLSRVDLQRQVQTLMGLHLSGPSHSQHYRHTPLETDFYDYKDDDDKTSGSGEGRGSLLTCGDVEENPGPHMTEYKPTVRLATRDDVPRAVRTLAAAFADYPATRHTVDPDRHIERVTELQELFLTRVGLDIGKVWVADDGAAVAVWTTPESVEAGAVFAEIGPRMAELSGSRLAAQQQMEGLLAPHRPKEPAWFLATVGVSPDHQGKGLGSAVVLPGVEAAERAGVPAFLETSAPRNLPFYERLGFTVTADVEVPEGPRTWCMTRKPGA

SEQ ID NO: 3118 - protein, 961 aa, Artificial Sequence
  Synthetic Polypeptide
MALPVTALLLPLALLLHAARPDIVMTQSPSSLTMSVGQKVTMSCKSSHSLLNSRNQKNYLAWFQQKPGQSPKLLVYFASTRESGVPDRFIGSGSGTDFTLTISNVQAEDLADYFCQQHYTTLPTFGGGTKLEIKGGGGSGGGGSGGGGSQIQLVQSGPDLKKPGETVKISCKASGYTFTNTGMNWVKQAPGKGLKWMGWINTYTGEPTYADDFKGRFTFSLETSASTAYLQINNLKNEDTATYFCTRWGYGSSLYYAMDYWGQGTSVTVSSTREQKLISEEDLAKPTTTPAPRPPTPAPTIASQPLSLRPEACRPAAGGAVHTRGLDFACDIYIWAPLAGTCGVLLLSLVITLYCKRGRKKLLYIFKQPFMRPVQTTQEEDGCSCRFPEEEEGGCELRVKFSRSADAPAYQQGQNQLYNELNLGRREEYDVLDKRRGRDPEMGGKPRRKNPQEGLYNELQKDKMAEAYSEIGMKGERRRGKGHDGLYQGLSTATKDTYDALHMQALPPRSRGSGATNFSLLKQAGDVEENPGPGIHMATYEVLCEVARKLGTDDREVVLFLLNVFIPQPTLAQLIGALRALKEEGRLTFPLLAECLFRAGRRDLLRDLLHLDPRFLERHLAGTMSYFSPYQLTVLHVDGELCARDIRSLIFLSKDTIGSRSTPQTFLHWVYCMENLDLLGPTDVDALMSMLRSLSRVDLQRQVQTLMGLHLSGPSHSQHYRHTPLETDFYDYKDDDDKTSGSGEGRGSLLTCGDVEENPGPHMTEYKPTVRLATRDDVPRAVRTLAAAFADYPATRHTVDPDRHIERVTELQELFLTRVGLDIGKVWVADDGAAVAVWTTPESVEAGAVFAEIGPRMAELSGSRLAAQQQMEGLLAPHRPKEPAWFLATVGVSPDHQGKGLGSAVVLPGVEAAERAGVPAFLETSAPRNLPFYERLGFTVTADVEVPEGPRTWCMTRKPGA

SEQ ID NO: 3119 - protein, 951 aa, Artificial Sequence
  Synthetic Polypeptide
MALPVTALLLPLALLLHAARPDIQMTQSPPSLSASVGGKVTITCKASQDIDRYMAWYQDKPGKGPKLLIHDTSTLQPGIPSRFSGSGSGRDYSFSISNLEPEDIATYYCLQYDNLWTFGGGTKLEIKRGGGGSGGGGSGGGGSQVQLVQSGAELVKPGASVKMSCKASGYIFTNYNIHWVKKSPGQGLEWIGAIYPGNGDAPYSQKFQDRATLTADTSSSTTYMELSSLTSEDSAVYYCVRANWDVAFAYWGQGTLVSVSSTREQKLISEEDLAKPTTTPAPRPPTPAPTIASQPLSLRPEACRPAAGGAVHTRGLDFACDIYIWAPLAGTCGVLLLSLVITLYCKRGRKKLLYIFKQPFMRPVQTTQEEDGCSCRFPEEEEGGCELRVKFSRSADAPAYQQGQNQLYNELNLGRREEYDVLDKRRGRDPEMGGKPRRKNPQEGLYNELQKDKMAEAYSEIGMKGERRRGKGHDGLYQGLSTATKDTYDALHMQALPPRSRGSGATNFSLLKQAGDVEENPGPGIHMATYEVLCEVARKLGTDDREVVLFLLNVFIPQPTLAQLIGALRALKEEGRLTFPLLAECLFRAGRRDLLRDLLHLDPRFLERHLAGTMSYFSPYQLTVLHVDGELCARDIRSLIFLSKDTIGSRSTPQTFLHWVYCMENLDLLGPTDVDALMSMLRSLSRVDLQRQVQTLMGLHLSGPSHSQHYRHTPLETDFYDYKDDDDKTSGSGEGRGSLLTCGDVEENPGPHMTEYKPTVRLATRDDVPRAVRTLAAAFADYPATRHTVDPDRHIERVTELQELFLTRVGLDIGKVWVADDGAAVAVWTTPESVEAGAVFAEIGPRMAELSGSRLAAQQQMEGLLAPHRPKEPAWFLATVGVSPDHQGKGLGSAVVLPGVEAAERAGVPAFLETSAPRNLPFYERLGFTVTADVEVPEGPRTWCMTRKPGA

SEQ ID NO: 3120 - protein, 952 aa, Artificial Sequence
  Synthetic Polypeptide
MALPVTALLLPLALLLHAARPDIQMTQSPASLSASVGETVTITCRVSGNIHNYLAWYQQKQGKSPQLLVYNAKTLADGVPSRFSGSGSGTQYSLKINSLQPEDFGSYYCQHFWSNPYTFGGGTKLEIKGGGGSGGGGSGGGGSQVQLQQSGASVKVSCKASELVRPGTGYAFTNYLIEWVKQRPGQGLEWIGVINPGSGGTNYNEKFKGKATLTADKSSSTAYMQLSSLTSDDSAVYFCARYRSYDWYFDVWGAGTTVTVSSTREQKLISEEDLAKPTTTPAPRPPTPAPTIASQPLSLRPEACRPAAGGAVHTRGLDFACDIYIWAPLAGTCGVLLLSLVITLYCKRGRKKLLYIFKQPFMRPVQTTQEEDGCSCRFPEEEEGGCELRVKFSRSADAPAYQQGQNQLYNELNLGRREEYDVLDKRRGRDPEMGGKPRRKNPQEGLYNELQKDKMAEAYSEIGMKGERRRGKGHDGLYQGLSTATKDTYDALHMQALPPRSRGSGATNFSLLKQAGDVEENPGPGIHMATYEVLCEVARKLGTDDREVVLFLLNVFIPQPTLAQLIGALRALKEEGRLTFPLLAECLFRAGRRDLLRDLLHLDPRFLERHLAGTMSYFSPYQLTVLHVDGELCARDIRSLIFLSKDTIGSRSTPQTFLHWVYCMENLDLLGPTDVDALMSMLRSLSRVDLQRQVQTLMGLHLSGPSHSQHYRHTPLETDFYDYKDDDDKTSGSGEGRGSLLTCGDVEENPGPHMTEYKPTVRLATRDDVPRAVRTLAAAFADYPATRHTVDPDRHIERVTELQELFLTRVGLDIGKVWVADDGAAVAVWTTPESVEAGAVFAEIGPRMAELSGSRLAAQQQMEGLLAPHRPKEPAWFLATVGVSPDHQGKGLGSAVVLPGVEAAERAGVPAFLETSAPRNLPFYERLGFTVTADVEVPEGPRTWCMTRKPGA

SEQ ID NO: 3121 - protein, 957 aa, Artificial Sequence
  Synthetic Polypeptide
MALPVTALLLPLALLLHAARPDDIQMTQSPSSLSASVGDRVTITCRSSQRIVHSNGNTYLEWYQQTPGKAPKLLIYKVSNRFSGVPSRFSGSGSGTDYTPTISSLQPEDIATYYCFQGSHVPPTFGQGTKLQITGGGGSGGGGSGGGGSEVQLVESGGGVVQPGRSLRLSCSSSGPTFSDYYMYWVRQAPGKGLEWVAYMSNVGAITDYPDTVKGRPTISRDNSKNTLFLMDSLRPEDTGVYFCARGTRDGSWFAYWGQGTPVTVSSTREQKLISEEDLAKPTTTPAPRPPTPAPTIASQPLSLRPEACRPAAGGAVHTRGLDFACDIYIWAPLAGTCGVLLLSLVITLYCKRGRKKLLYIFKQPFMRPVQTTQEEDGCSCRFPEEEEGGCELRVKFSRSADAPAYQQGQNQLYNELNLGRREEYDVLDKRRGRDPEMGGKPRRKNPQEGLYNELQKDKMAEAYSEIGMKGERRRGKGHDGLYQGLSTATKDTYDALHMQALPPRSRGSGATNFSLLKQAGDVEENPGPGIHMATYEVLCEVARKLGTDDREVVLFLLNVFIPQPTLAQLIGALRALKEEGRLTFPLLAECLFRAGRRDLLRDLLHLDPRFLERHLAGTMSYFSPYQLTVLHVDGELCARDIRSLIFLSKDTIGSRSTPQTFLHWVYCMENLDLLGPTDVDALMSMLRSLSRVDLQRQVQTLMGLHLSGPSHSQHYRHTPLETDFYDYKDDDDKTSGSGEGRGSLLTCGDVEENPGPHMTEYKPTVRLATRDDVPRAVRTLAAAFADYPATRHTVDPDRHIERVTELQELFLTRVGLDIGKVWVADDGAAVAVWTTPESVEAGAVFAEIGPRMAELSGSRLAAQQQMEGLLAPHRPKEPAWFLATVGVSPDHQGKGLGSAVVLPGVEAAERAGVPAFLETSAPRNLPFYERLGFTVTADVEVPEGPRTWCMTRKPGA

SEQ ID NO: 3122 - protein, 951 aa, Artificial Sequence
  Synthetic Polypeptide
MALPVTALLLPLALLLHAARPDIQMTQSFSSLSASVGDRVTITCRASQDISNYLNWYQQKPGKAPKLLIYYTSRLHSGVPSRFSGSGSGTDYTLTISSLQPEDFATYFCQQGNTLPWTFGGGTKLEIKRGGGGSGGGGSGGGGSEVQLVQSGGGLVQSGGSLRLSCRASGYTFTRYWMLWVRQRPGKGLEWVAEINPRNDRTNYNEKFKTRFTISVDRSKNTLYLQMDSLRAEDTAVYFCALGGGYAMDYWGQGTLVTVSSTREQKLISEEDLAKPTTTPAPRPPTPAPTIASQPLSLRPEACRPAAGGAVHTRGLDFACDIYIWAPLAGTCGVLLLSLVITLYCKRGRKKLLYIFKQPFMRPVQTTQEEDGCSCRFPEEEEGGCELRVKFSRSADAPAYQQGQNQLYNELNLGRREEYDVLDKRRGRDPEMGGKPRRKNPQEGLYNELQKDKMAEAYSEIGMKGERRRGKGHDGLYQGLSTATKDTYDALHMQALPPRSRGSGATNFSLLKQAGDVEENPGPGIHMATYEVLCEVARKLGTDDREVVLFLLNVFIPQPTLAQLIGALRALKEEGRLTFPLLAECLFRAGRRDLLRDLLHLDPRFLERHLAGTMSYFSPYQLTVLHVDGELCARDIRSLIFLSKDTIGSRSTPQTFLHWVYCMENLDLLGPTDVDALMSMLRSLSRVDLQRQVQTLMGLHLSGPSHSQHYRHTPLETDFYDYKDDDDKTSGSGEGRGSLLTCGDVEENPGPHMTEYKPTVRLATRDDVPRAVRTLAAAFADYPATRHTVDPDRHIERVTELQELFLTRVGLDIGKVWVADDGAAVAVWTTPESVEAGAVFAEIGPRMAELSGSRLAAQQQMEGLLAPHRPKEPAWFLATVGVSPDHQGKGLGSAVVLPGVEAAERAGVPAFLETSAPRNLPFYERLGFTVTADVEVPEGPRTWCMTRKPGA

SEQ ID NO: 3123 - protein, 938 aa, Artificial Sequence
  Synthetic Polypeptide
MEMLQGLLLLLLLSMGGAWASREPLRPWCHPINAILAVEKEGCPVCITVNTTICAGYCPTMMRVLQAVLPPLPQVVCTYRDVRFESIRLPGCPRGVDPVVSFPVALSCRCGPCRRSTSDCGGPKDHPLTCDHPQLSGLLFLGGGGSGGGGSGGGGSAPDVQDCPECTLQENPFFSQPGAPILQCMGCCFSRAYPTPLRSKKTMLVQKNVTSESTCCVAKSYNRVTVMGGFKVENHTACHCSTCYYHKSTREQKLISEEDLAKPTTTPAPRPPTPAPTIASQPLSLRPEACRPAAGGAVHTRGLDFACDIYIWAPLAGTCGVLLLSLVITLYCKRGRKKLLYIFKQPFMRPVQTTQEEDGCSCRFPEEEEGGCELRVKFSRSADAPAYQQGQNQLYNELNLGRREEYDVLDKRRGRDPEMGGKPRRKNPQEGLYNELQKDKMAEAYSEIGMKGERRRGKGHDGLYQGLSTATKDTYDALHMQALPPRSRGSGATNFSLLKQAGDVEENPGPGIHMATYEVLCEVARKLGTDDREVVLFLLNVFIPQPTLAQLIGALRALKEEGRLTFPLLAECLFRAGRRDLLRDLLHLDPRFLERHLAGTMSYFSPYQLTVLHVDGELCARDIRSLIFLSKDTIGSRSTPQTFLHWVYCMENLDLLGPTDVDALMSMLRSLSRVDLQRQVQTLMGLHLSGPSHSQHYRHTPLETDFYDYKDDDDKTSGSGEGRGSLLTCGDVEENPGPHMTEYKPTVRLATRDDVPRAVRTLAAAFADYPATRHTVDPDRHIERVTELQELFLTRVGLDIGKVWVADDGAAVAVWTTPESVEAGAVFAEIGPRMAELSGSRLAAQQQMEGLLAPHRPKEPAWFLATVGVSPDHQGKGLGSAVVLPGVEAAERAGVPAFLETSAPRNLPFYERLGFTVTADVEVPEGPRTWCMTRKPGA

SEQ ID NO: 3124 - protein, 952 aa, Artificial Sequence
  Synthetic Polypeptide
MALPVTALLLPLALLLHAARPDIQMTQSPASLSASVGETVTIICRASVNIYSYLAWYQQKQGKSPQLLVYNAKILAEGVPSRFSGSGSGTQFSLKINSLQPEDFGSYYCQHHYGTFTFGSGTKLEIKRGGGGSGGGGSGGGGSQVQLKESGPGLVAPSQSLSITCTISGFSLTSYGVHWVRQPPGKGLEWLVVIWSDGSTTYNSALKSRLSISKDNSKSQVFLKMNSLQTDDTAIYYCASHYGSTLAFASWGHGTLVTVSAATREQKLISEEDLAKPTTTPAPRPPTPAPTIASQPLSLRPEACRPAAGGAVHTRGLDFACDIYIWAPLAGTCGVLLLSLVITLYCKRGRKKLLYIFKQPFMRPVQTTQEEDGCSCRFPEEEEGGCELRVKFSRSADAPAYQQGQNQLYNELNLGRREEYDVLDKRRGRDPEMGGKPRRKNPQEGLYNELQKDKMAEAYSEIGMKGERRRGKGHDGLYQGLSTATKDTYDALHMQALPPRSRGSGATNFSLLKQAGDVEENPGPGIHMATYEVLCEVARKLGTDDREVVLFLLNVFIPQPTLAQLIGALRALKEEGRLTFPLLAECLFRAGRRDLLRDLLHLDPRFLERHLAGTMSYFSPYQLTVLHVDGELCARDIRSLIFLSKDTIGSRSTPQTFLHWVYCMENLDLLGPTDVDALMSMLRSLSRVDLQRQVQTLMGLHLSGPSHSQHYRHTPLETDFYDYKDDDDKTSGSGEGRGSLLTCGDVEENPGPHMTEYKPTVRLATRDDVPRAVRTLAAAFADYPATRHTVDPDRHIERVTELQELFLTRVGLDIGKVWVADDGAAVAVWTTPESVEAGAVFAEIGPRMAELSGSRLAAQQQMEGLLAPHRPKEPAWFLATVGVSPDHQGKGLGSAVVLPGVEAAERAGVPAFLETSAPRNLPFYERLGFTVTADVEVPEGPRTWCMTRKPGA

SEQ ID NO: 3125 - protein, 960 aa, Artificial Sequence
  Synthetic Polypeptide
MALPVTALLLPLALLLHAARPDIVMTQSHKFMSTSVGDRVSVTCKASQNVGNNVAWYQQKPGQSPKVLIYSASYRYSGVPDRFTGSGSGTDFTLTISNVQSEDLAEYFCQQYNTYPFTFGSGTKLEIKGGGGSGGGGSGGGGSEVQLEESGGGLVQPGGSMKLSCVASGFTFSNYWMNWVRQSPEKGLEWVAEIRFKSHNYATHFAESVKGRFTISRDDSKSSVYLQMNNLRAEDTGIYYCTRRIGNSDYDWWYFDVWGAGTSVTVSSASTREQKLISEEDLAKPTTTPAPRPPTPAPTIASQPLSLRPEACRPAAGGAVHTRGLDFACDIYIWAPLAGTCGVLLLSLVITLYCKRGRKKLLYIFKQPFMRPVQTTQEEDGCSCRFPEEEEGGCELRVKFSRSADAPAYQQGQNQLYNELNLGRREEYDVLDKRRGRDPEMGGKPRRKNPQEGLYNELQKDKMAEAYSEIGMKGERRRGKGHDGLYQGLSTATKDTYDALHMQALPPRSRGSGATNFSLLKQAGDVEENPGPGIHMATYEVLCEVARKLGTDDREVVLFLLNVFIPQPTLAQLIGALRALKEEGRLTFPLLAECLFRAGRRDLLRDLLHLDPRFLERHLAGTMSYFSPYQLTVLHVDGELCARDIRSLIFLSKDTIGSRSTPQTFLHWVYCMENLDLLGPTDVDALMSMLRSLSRVDLQRQVQTLMGLHLSGPSHSQHYRHTPLETDFYDYKDDDDKTSGSGEGRGSLLTCGDVEENPGPHMTEYKPTVRLATRDDVPRAVRTLAAAFADYPATRHTVDPDRHIERVTELQELFLTRVGLDIGKVWVADDGAAVAVWTTPESVEAGAVFAEIGPRMAELSGSRLAAQQQMEGLLAPHRPKEPAWFLATVGVSPDHQGKGLGSAVVLPGVEAAERAGVPAFLETSAPRNLPFYERLGFTVTADVEVPEGPRTWCMTRKPGA

SEQ ID NO: 3126 - protein, 956 aa, Artificial Sequence; identical to SEQ ID NO: 3011
  Synthetic Polypeptide

SEQ ID NO: 3127 - protein, 962 aa, Artificial Sequence
  Synthetic Polypeptide
MALPVTALLLPLALLLHAARPDQSVLTQPPSVSGAPGQRVTISCTGSSSNIGAGYDVHWYQQLPGTAPKLLIYGNSNRPSGVPDRFSGSKSGTSASLAITGLQAEDEADYYCQSYDNSLSSWVFGGGTKLTVLGQPKGGGGSGGGGSGGGGSEVQLQQSGAEVKKPGSSVKVSCKASGGTFSSYAISWVRQAPGQGLEWMGRIIPILGIANYAQKFQGRVTITADKSTSTAYMELSSLRSEDTAVYYCARDVGSGSYSLDYWGQGTLVTVSSTREQKLISEEDLAKPTTTPAPRPPTPAPTIASQPLSLRPEACRPAAGGAVHTRGLDFACDIYIWAPLAGTCGVLLLSLVITLYCKRGRKKLLYIFKQPFMRPVQTTQEEDGCSCRFPEEEEGGCELRVKFSRSADAPAYQQGQNQLYNELNLGRREEYDVLDKRRGRDPEMGGKPRRKNPQEGLYNELQKDKMAEAYSEIGMKGERRRGKGHDGLYQGLSTATKDTYDALHMQALPPRSRGSGATNFSLLKQAGDVEENPGPGIHMATYEVLCEVARKLGTDDREVVLFLLNVFIPQPTLAQLIGALRALKEEGRLTFPLLAECLFRAGRRDLLRDLLHLDPRFLERHLAGTMSYFSPYQLTVLHVDGELCARDIRSLIFLSKDTIGSRSTPQTFLHWVYCMENLDLLGPTDVDALMSMLRSLSRVDLQRQVQTLMGLHLSGPSHSQHYRHTPLETDFYDYKDDDDKTSGSGEGRGSLLTCGDVEENPGPHMTEYKPTVRLATRDDVPRAVRTLAAAFADYPATRHTVDPDRHIERVTELQELFLTRVGLDIGKVWVADDGAAVAVWTTPESVEAGAVFAEIGPRMAELSGSRLAAQQQMEGLLAPHRPKEPAWFLATVGVSPDHQGKGLGSAVVLPGVEAAERAGVPAFLETSAPRNLPFYERLGFTVTADVEVPEGPRTWCMTRKPGA

SEQ ID NO: 3128 - protein, 959 aa, Artificial Sequence
  Synthetic Polypeptide
MALPVTALLLPLALLLHAARPDQSVVTQPPSVSAAPGRKVTISCSGSSSNIGSNYVSWYQQVPGTAPKLLIYEDDKRPSGIPDRFSGSKSGTSATLGITGLQTGDEADYFCATWDRTVNVVRFGGGTRLTVHSQPKGGGGSGGGGSGGGGSQLQLQESGPGLVKPSETLSLTCTVSGGSISSSSYYWGWIRQPPGKGLEWIGSIYYSGSTYYNPSLKSRVTISVDTSKNQFSLKLSSVTAADTAVYYCARHVGHELDYWGQGTLVTVSSTREQKLISEEDLAKPTTTPAPRPPTPAPTIASQPLSLRPEACRPAAGGAVHTRGLDFACDIYIWAPLAGTCGVLLLSLVITLYCKRGRKKLLYIFKQPFMRPVQTTQEEDGCSCRFPEEEEGGCELRVKFSRSADAPAYQQGQNQLYNELNLGRREEYDVLDKRRGRDPEMGGKPRRKNPQEGLYNELQKDKMAEAYSEIGMKGERRRGKGHDGLYQGLSTATKDTYDALHMQALPPRSRGSGATNFSLLKQAGDVEENPGPGIHMATYEVLCEVARKLGTDDREVVLFLLNVFIPQPTLAQLIGALRALKEEGRLTFPLLAECLFRAGRRDLLRDLLHLDPRFLERHLAGTMSYFSPYQLTVLHVDGELCARDIRSLIFLSKDTIGSRSTPQTFLHWVYCMENLDLLGPTDVDALMSMLRSLSRVDLQRQVQTLMGLHLSGPSHSQHYRHTPLETDFYDYKDDDDKTSGSGEGRGSLLTCGDVEENPGPHMTEYKPTVRLATRDDVPRAVRTLAAAFADYPATRHTVDPDRHIERVTELQELFLTRVGLDIGKVWVADDGAAVAVWTTPESVEAGAVFAEIGPRMAELSGSRLAAQQQMEGLLAPHRPKEPAWFLATVGVSPDHQGKGLGSAVVLPGVEAAERAGVPAFLETSAPRNLPFYERLGFTVTADVEVPEGPRTWCMTRKPGA

SEQ ID NO: 3129 - protein, 953 aa, Artificial Sequence
  Synthetic Polypeptide
MALPVTALLLPLALLLHAARPDIQMTQSPSSLSASVGDRVTITCRASQSISSYLNWYQQKPGKAPKLLIYAASSLQSGVPSGFSGSGSGTDFTLTISSLQPEDFATYYCQQSYSTPLTFGGGTKVEIKRGGGGSGGGGSGGGGSQVQLQESGPGLVKPSETLSLTCTVSGGSVSSGSYYWSWIRQPPGKGLEWIGYIYYSGSTNYNPSLKSRVTISVDTSKNQFSLKLSSVTAADTAVYYCAREGKNGAFDIWGQGTMVTVSSTREQKLISEEDLAKPTTTPAPRPPTPAPTIASQPLSLRPEACRPAAGGAVHTRGLDFACDIYIWAPLAGTCGVLLLSLVITLYCKRGRKKLLYIFKQPFMRPVQTTQEEDGCSCRFPEEEEGGCELRVKFSRSADAPAYQQGQNQLYNELNLGRREEYDVLDKRRGRDPEMGGKPRRKNPQEGLYNELQKDKMAEAYSEIGMKGERRRGKGHDGLYQGLSTATKDTYDALHMQALPPRSRGSGATNFSLLKQAGDVEENPGPGIHMATYEVLCEVARKLGTDDREVVLFLLNVFIPQPTLAQLIGALRALKEEGRLTFPLLAECLFRAGRRDLLRDLLHLDPRFLERHLAGTMSYFSPYQLTVLHVDGELCARDIRSLIFLSKDTIGSRSTPQTFLHWVYCMENLDLLGPTDVDALMSMLRSLSRVDLQRQVQTLMGLHLSGPSHSQHYRHTPLETDFYDYKDDDDKTSGSGEGRGSLLTCGDVEENPGPHMTEYKPTVRLATRDDVPRAVRTLAAAFADYPATRHTVDPDRHIERVTELQELFLTRVGLDIGKVWVADDGAAVAVWTTPESVEAGAVFAEIGPRMAELSGSRLAAQQQMEGLLAPHRPKEPAWFLATVGVSPDHQGKGLGSAVVLPGVEAAERAGVPAFLETSAPRNLPFYERLGFTVTADVEVPEGPRTWCMTRKPGA

SEQ ID NO: 3130 - protein, 839 aa, Artificial Sequence
  Synthetic Polypeptide
MALPVTALLLPLALLLHAARPDEFDVQLVESGGGLVQPGGSLRLSCAASGFILDYYAIGWFRQAPGKEREGVLCIDASDDITYYADSVKGRFTISRDNSKNTVYLQMNSLRPEDTAVYYCATPIGLSSSCLLEYDYDYWGQGTLVTVSSTREQKLISEEDLAKPTTTPAPRPPTPAPTIASQPLSLRPEACRPAAGGAVHTRGLDFACDIYIWAPLAGTCGVLLLSLVITLYCKRGRKKLLYIFKQPFMRPVQTTQEEDGCSCRFPEEEEGGCELRVKFSRSADAPAYQQGQNQLYNELNLGRREEYDVLDKRRGRDPEMGGKPRRKNPQEGLYNELQKDKMAEAYSEIGMKGERRRGKGHDGLYQGLSTATKDTYDALHMQALPPRSRGSGATNFSLLKQAGDVEENPGPGIHMATYEVLCEVARKLGTDDREVVLFLLNVFIPQPTLAQLIGALRALKEEGRLTFPLLAECLFRAGRRDLLRDLLHLDPRFLERHLAGTMSYFSPYQLTVLHVDGELCARDIRSLIFLSKDTIGSRSTPQTFLHWVYCMENLDLLGPTDVDALMSMLRSLSRVDLQRQVQTLMGLHLSGPSHSQHYRHTPLETDFYDYKDDDDKTSGSGEGRGSLLTCGDVEENPGPHMTEYKPTVRLATRDDVPRAVRTLAAAFADYPATRHTVDPDRHIERVTELQELFLTRVGLDIGKVWVADDGAAVAVWTTPESVEAGAVFAEIGPRMAELSGSRLAAQQQMEGLLAPHRPKEPAWFLATVGVSPDHQGKGLGSAVVLPGVEAAERAGVPAFLETSAPRNLPFYERLGFTVTADVEVPEGPRTWCMTRKPGA

SEQ ID NO: 3131 - protein, 1002 aa, Artificial Sequence
  Synthetic Polypeptide
MALPVTALLLPLALLLHAARPDEFDVQLVESGGGLVQPGGSLRLSCAASGFILDYYAIGWFRQAPGKEREGVLCIDASDDITYYADSVKGRFTISRDNSKNTVYLQMNSLRPEDTAVYYCATPIGLSSSCLLEYDYDYWGQGTLVTVSSLEGGSGSGGGGSGGGGSGSGGSGSGGSGSGGSGSGGSFEVQLVESGGGLVQPGGSLRLSCAASGRTYYLNAMGWFRQAPGKEREFVAAIDWSEGNKDYADSVKGRFTISRDNSKNTVYLQMNSLRPEDTAVYYCAADTPPWGPLIYIESYDSWGQGTLVTVSSTREQKLISEEDLAKPTTTPAPRPPTPAPTIASQPLSLRPEACRPAAGGAVHTRGLDFACDIYIWAPLAGTCGVLLLSLVITLYCKRGRKKLLYIFKQPFMRPVQTTQEEDGCSCRFPEEEEGGCELRVKFSRSADAPAYQQGQNQLYNELNLGRREEYDVLDKRRGRDPEMGGKPRRKNPQEGLYNELQKDKMAEAYSEIGMKGERRRGKGHDGLYQGLSTATKDTYDALHMQALPPRSRGSGATNFSLLKQAGDVEENPGPGIHMATYEVLCEVARKLGTDDREVVLFLLNVFIPQPTLAQLIGALRALKEEGRLTFPLLAECLFRAGRRDLLRDLLHLDPRFLERHLAGTMSYFSPYQLTVLHVDGELCARDIRSLIFLSKDTIGSRSTPQTFLHWVYCMENLDLLGPTDVDALMSMLRSLSRVDLQRQVQTLMGLHLSGPSHSQHYRHTPLETDFYDYKDDDDKTSGSGEGRGSLLTCGDVEENPGPHMTEYKPTVRLATRDDVPRAVRTLAAAFADYPATRHTVDPDRHIERVTELQELFLTRVGLDIGKVWVADDGAAVAVWTTPESVEAGAVFAEIGPRMAELSGSRLAAQQQMEGLLAPHRPKEPAWFLATVGVSPDHQGKGLGSAVVLPGVEAAERAGVPAFLETSAPRNLPFYERLGFTVTADVEVPEGPRTWCMTRKPGA

SEQ ID NO: 3132 - protein, 953 aa, Artificial Sequence
  Synthetic Polypeptide
MALPVTALLLPLALLLHAARPDQIVLTQSPAIMSASPGEKVTISCSASSSVSYMYWYQQKPGSSPKPWIYRTSNLASGVPARFSGSGSGTSYSLTISNMEAEDAAAYYCQQYHSYPTTFGGGTKLEVKGGGGSGGGGSGGGGSEVQLVESGGGLVQPKGSLKLSCAASGFSFNTYAMNWVRQAPGKGLEWIAHIRSKSNNFATYYADSVKDRFSISRDASENILFLQMNNLKTEDTAMYYCVRQGGDFPMDYWGQGTSVTVSSTREQKLISEEDLAKPTTTPAPRPPTPAPTIASQPLSLRPEACRPAAGGAVHTRGLDFACDIYIWAPLAGTCGVLLLSLVITLYCKRGRKKLLYIFKQPFMRPVQTTQEEDGCSCRFPEEEEGGCELRVKFSRSADAPAYQQGQNQLYNELNLGRREEYDVLDKRRGRDPEMGGKPRRKNPQEGLYNELQKDKMAEAYSEIGMKGERRRGKGHDGLYQGLSTATKDTYDALHMQALPPRSRGSGATNFSLLKQAGDVEENPGPGIHMATYEVLCEVARKLGTDDREVVLFLLNVFIPQPTLAQLIGALRALKEEGRLTFPLLAECLFRAGRRDLLRDLLHLDPRFLERHLAGTMSYFSPYQLTVLHVDGELCARDIRSLIFLSKDTIGSRSTPQTFLHWVYCMENLDLLGPTDVDALMSMLRSLSRVDLQRQVQTLMGLHLSGPSHSQHYRHTPLETDFYDYKDDDDKTSGSGEGRGSLLTCGDVEENPGPHMTEYKPTVRLATRDDVPRAVRTLAAAFADYPATRHTVDPDRHIERVTELQELFLTRVGLDIGKVWVADDGAAVAVWTTPESVEAGAVFAEIGPRMAELSGSRLAAQQQMEGLLAPHRPKEPAWFLATVGVSPDHQGKGLGSAVVLPGVEAAERAGVPAFLETSAPRNLPFYERLGFTVTADVEVPEGPRTWCMTRKPGA

SEQ ID NO: 3133 - protein, 952 aa, Artificial Sequence
  Synthetic Polypeptide
MALPVTALLLPLALLLHAARPDDIQMTQSSSSFSVSLGDRVTITCMASEDIYIRLAWYQQKPGNAPRLLISAATSLETGVPSRFSGSGSGKDYTLSITSLQTEDVGTYYCQQYWSSPWTFGGGTKLEINGGGGSGGGGSGGGGSDVQLQESGPGLVKPSQSLSLTCTVTGYSITSDYTWNWIRQFPGNKLEWMGYITYSGSTSYNPSLKSRNSITRDTSKNQFFLQLNSVTTEDTATYYCARLGRRYTMDYWGQGTSVTVSSTREQKLISEEDLAKPTTTPAPRPPTPAPTIASQPLSLRPEACRPAAGGAVHTRGLDFACDIYIWAPLAGTCGVLLLSLVITLYCKRGRKKLLYIFKQPFMRPVQTTQEEDGCSCRFPEEEEGGCELRVKFSRSADAPAYQQGQNQLYNELNLGRREEYDVLDKRRGRDPEMGGKPRRKNPQEGLYNELQKDKMAEAYSEIGMKGERRRGKGHDGLYQGLSTATKDTYDALHMQALPPRSRGSGATNFSLLKQAGDVEENPGPGIHMATYEVLCEVARKLGTDDREVVLFLLNVFIPQPTLAQLIGALRALKEEGRLTFPLLAECLFRAGRRDLLRDLLHLDPRFLERHLAGTMSYFSPYQLTVLHVDGELCARDIRSLIFLSKDTIGSRSTPQTFLHWVYCMENLDLLGPTDVDALMSMLRSLSRVDLQRQVQTLMGLHLSGPSHSQHYRHTPLETDFYDYKDDDDKTSGSGEGRGSLLTCGDVEENPGPHMTEYKPTVRLATRDDVPRAVRTLAAAFADYPATRHTVDPDRHIERVTELQELFLTRVGLDIGKVWVADDGAAVAVWTTPESVEAGAVFAEIGPRMAELSGSRLAAQQQMEGLLAPHRPKEPAWFLATVGVSPDHQGKGLGSAVVLPGVEAAERAGVPAFLETSAPRNLPFYERLGFTVTADVEVPEGPRTWCMTRKPGA

SEQ ID NO: 3134 - protein, 951 aa, Artificial Sequence
  Synthetic Polypeptide
MALPVTALLLPLALLLHAARPDVQLQESGPGLVKPSQSLSLTCTVTGYSITSDYTWNWIRQFPGNKLEWMGYITYSGSTSYNPSLKSRNSITRDTSKNQFFLQLNSVTTEDTATYYCARLGRRYTMDYWGQGTSVTVSSGGGGSGGGGSGGGGSDIQMTQSSSSFSVSLGDRVTITCMASEDIYIRLAWYQQKPGNAPRLLISAATSLETGVPSRFSGSGSGKDYTLSITSLQTEDVGTYYCQQYWSSPWTFGGGTKLEINTREQKLISEEDLAKPTTTPAPRPPTPAPTIASQPLSLRPEACRPAAGGAVHTRGLDFACDIYIWAPLAGTCGVLLLSLVITLYCKRGRKKLLYIFKQPFMRPVQTTQEEDGCSCRFPEEEEGGCELRVKFSRSADAPAYQQGQNQLYNELNLGRREEYDVLDKRRGRDPEMGGKPRRKNPQEGLYNELQKDKMAEAYSEIGMKGERRRGKGHDGLYQGLSTATKDTYDALHMQALPPRSRGSGATNFSLLKQAGDVEENPGPGIHMATYEVLCEVARKLGTDDREVVLFLLNVFIPQPTLAQLIGALRALKEEGRLTFPLLAECLFRAGRRDLLRDLLHLDPRFLERHLAGTMSYFSPYQLTVLHVDGELCARDIRSLIFLSKDTIGSRSTPQTFLHWVYCMENLDLLGPTDVDALMSMLRSLSRVDLQRQVQTLMGLHLSGPSHSQHYRHTPLETDFYDYKDDDDKTSGSGEGRGSLLTCGDVEENPGPHMTEYKPTVRLATRDDVPRAVRTLAAAFADYPATRHTVDPDRHIERVTELQELFLTRVGLDIGKVWVADDGAAVAVWTTPESVEAGAVFAEIGPRMAELSGSRLAAQQQMEGLLAPHRPKEPAWFLATVGVSPDHQGKGLGSAVVLPGVEAAERAGVPAFLETSAPRNLPFYERLGFTVTADVEVPEGPRTWCMTRKPGA

SEQ ID NO: 3135 - protein, 952 aa, Artificial Sequence
  Synthetic Polypeptide
MALPVTALLLPLALLLHAARPDIQMTQSSSSFSVSLGDRVTITCKASEDIYIRLAWYQQKPGNAPRLLISAATSLETGIPSRFSGSGSGEDYTLTITSLQTEDVATYYCQQYWTTPWTFGGGTKLEIKRGGGGSGGGGSGGGGSDVQLQESGPGLVKPSQSLSLTCTVTGYSITIDYTWNWIRQFPGNKLEWMGYITYSGSTDYNPSLKSRSSITRDTSMNQFFLQLNSVTTEDTATYYCARLGRRYALDYWGQGTSVTVSSTREQKLISEEDLAKPTTTPAPRPPTPAPTIASQPLSLRPEACRPAAGGAVHTRGLDFACDIYIWAPLAGTCGVLLLSLVITLYCKRGRKKLLYIFKQPFMRPVQTTQEEDGCSCRFPEEEEGGCELRVKFSRSADAPAYQQGQNQLYNELNLGRREEYDVLDKRRGRDPEMGGKPRRKNPQEGLYNELQKDKMAEAYSEIGMKGERRRGKGHDGLYQGLSTATKDTYDALHMQALPPRSRGSGATNFSLLKQAGDVEENPGPGIHMATYEVLCEVARKLGTDDREVVLFLLNVFIPQPTLAQLIGALRALKEEGRLTFPLLAECLFRAGRRDLLRDLLHLDPRFLERHLAGTMSYFSPYQLTVLHVDGELCARDIRSLIFLSKDTIGSRSTPQTFLHWVYCMENLDLLGPTDVDALMSMLRSLSRVDLQRQVQTLMGLHLSGPSHSQHYRHTPLETDFYDYKDDDDKTSGSGEGRGSLLTCGDVEENPGPHMTEYKPTVRLATRDDVPRAVRTLAAAFADYPATRHTVDPDRHIERVTELQELFLTRVGLDIGKVWVADDGAAVAVWTTPESVEAGAVFAEIGPRMAELSGSRLAAQQQMEGLLAPHRPKEPAWFLATVGVSPDHQGKGLGSAVVLPGVEAAERAGVPAFLETSAPRNLPFYERLGFTVTADVEVPEGPRTWCMTRKPGA

SEQ ID NO: 3136 - protein, 953 aa, Artificial Sequence
  Synthetic Polypeptide
MALPVTALLLPLALLLHAARPDIVMTQAAPSIPVTPGESVSISCRSDKSLLHSNGNTYLFWFLQRPGQSPQLLIYRMSNLASGVPDRFSGSGSGTAFTLRISGVEAEDVGVYYCMQHLEYPYTFGGGTKLEIKGGGGSGGGGSGGGGSQVQLQQSGPELVKPGASVKMSCKASGYAFSSSWLNWVRQRPGKGLEWIGRIYPGDGENHYNGKFKGKATLTADKSSSTGYMQLSSLTSEDSAVYFCASYYEGGYWGQGTLITVSATREQKLISEEDLAKPTTTPAPRPPTPAPTIASQPLSLRPEACRPAAGGAVHTRGLDFACDIYIWAPLAGTCGVLLLSLVITLYCKRGRKKLLYIFKQPFMRPVQTTQEEDGCSCRFPEEEEGGCELRVKFSRSADAPAYQQGQNQLYNELNLGRREEYDVLDKRRGRDPEMGGKPRRKNPQEGLYNELQKDKMAEAYSEIGMKGERRRGKGHDGLYQGLSTATKDTYDALHMQALPPRSRGSGATNFSLLKQAGDVEENPGPGIHMATYEVLCEVARKLGTDDREVVLFLLNVFIPQPTLAQLIGALRALKEEGRLTFPLLAECLFRAGRRDLLRDLLHLDPRFLERHLAGTMSYFSPYQLTVLHVDGELCARDIRSLIFLSKDTIGSRSTPQTFLHWVYCMENLDLLGPTDVDALMSMLRSLSRVDLQRQVQTLMGLHLSGPSHSQHYRHTPLETDFYDYKDDDDKTSGSGEGRGSLLTCGDVEENPGPHMTEYKPTVRLATRDDVPRAVRTLAAAFADYPATRHTVDPDRHIERVTELQELFLTRVGLDIGKVWVADDGAAVAVWTTPESVEAGAVFAEIGPRMAELSGSRLAAQQQMEGLLAPHRPKEPAWFLATVGVSPDHQGKGLGSAVVLPGVEAAERAGVPAFLETSAPRNLPFYERLGFTVTADVEVPEGPRTWCMTRKPGA

SEQ ID NO: 3137 - protein, 952 aa, Artificial Sequence
  Synthetic Polypeptide
MALPVTALLLPLALLLHAARPDIVLTQSPASLAVSLGQSVTISCRASESVEYYGTSLMQWYQQKPGQPPKLLIYGASNVESGVPARFSGSGSGTDFSLNIHPVEEDDIAMYFCQQSRKVPWTFGGGTKLEIKGGGGSGGGGSGGGGSEVKLVESGGGLVKPGGSRKLSCAASGFTFSSYTMSWVRQTPAKRLEWVATISSGSSTIYYADTVKGRFTISRDNAKNTLFLQMTSLRSEDTAMYYCARRWFLDCWGQGTTLTVSSTREQKLISEEDLAKPTTTPAPRPPTPAPTIASQPLSLRPEACRPAAGGAVHTRGLDFACDIYIWAPLAGTCGVLLLSLVITLYCKRGRKKLLYIFKQPFMRPVQTTQEEDGCSCRFPEEEEGGCELRVKFSRSADAPAYQQGQNQLYNELNLGRREEYDVLDKRRGRDPEMGGKPRRKNPQEGLYNELQKDKMAEAYSEIGMKGERRRGKGHDGLYQGLSTATKDTYDALHMQALPPRSRGSGATNFSLLKQAGDVEENPGPGIHMATYEVLCEVARKLGTDDREVVLFLLNVFIPQPTLAQLIGALRALKEEGRLTFPLLAECLFRAGRRDLLRDLLHLDPRFLERHLAGTMSYFSPYQLTVLHVDGELCARDIRSLIFLSKDTIGSRSTPQTFLHWVYCMENLDLLGPTDVDALMSMLRSLSRVDLQRQVQTLMGLHLSGPSHSQHYRHTPLETDFYDYKDDDDKTSGSGEGRGSLLTCGDVEENPGPHMTEYKPTVRLATRDDVPRAVRTLAAAFADYPATRHTVDPDRHIERVTELQELFLTRVGLDIGKVWVADDGAAVAVWTTPESVEAGAVFAEIGPRMAELSGSRLAAQQQMEGLLAPHRPKEPAWFLATVGVSPDHQGKGLGSAVVLPGVEAAERAGVPAFLETSAPRNLPFYERLGFTVTADVEVPEGPRTWCMTRKPGA

SEQ ID NO: 3138 - protein, 955 aa, Artificial Sequence
  Synthetic Polypeptide
MALPVTALLLPLALLLHAARPDQVQLQQSGPGLVKPSETLSLTCTVSGDSISSYYWSWIRQPPGKGLEWIGYIYYSGSTNYNPSLKSRVTISVDTSKSQFSLKLSSVTAADTAVYYCARGRYFDVWGRGTMVTSSGGGGSGGGGSGGGGSSSYVLTQPPSVSGSPGQSITISCTGTSSDVGGYNYVSWYQQHPGKAPKLMIYEGSKRPSGVSNRFSGSKSGNTASLTISGLQAEDEADYYCSSYTTRSTRVFGGGTKLTVLGAAATREQKLISEEDLAKPTTTPAPRPPTPAPTIASQPLSLRPEACRPAAGGAVHTRGLDFACDIYIWAPLAGTCGVLLLSLVITLYCKRGRKKLLYIFKQPFMRPVQTTQEEDGCSCRFPEEEEGGCELRVKFSRSADAPAYQQGQNQLYNELNLGRREEYDVLDKRRGRDPEMGGKPRRKNPQEGLYNELQKDKMAEAYSEIGMKGERRRGKGHDGLYQGLSTATKDTYDALHMQALPPRSRGSGATNFSLLKQAGDVEENPGPGIHMATYEVLCEVARKLGTDDREVVLFLLNVFIPQPTLAQLIGALRALKEEGRLTFPLLAECLFRAGRRDLLRDLLHLDPRFLERHLAGTMSYFSPYQLTVLHVDGELCARDIRSLIFLSKDTIGSRSTPQTFLHWVYCMENLDLLGPTDVDALMSMLRSLSRVDLQRQVQTLMGLHLSGPSHSQHYRHTPLETDFYDYKDDDDKTSGSGEGRGSLLTCGDVEENPGPHMTEYKPTVRLATRDDVPRAVRTLAAAFADYPATRHTVDPDRHIERVTELQELFLTRVGLDIGKVWVADDGAAVAVWTTPESVEAGAVFAEIGPRMAELSGSRLAAQQQMEGLLAPHRPKEPAWFLATVGVSPDHQGKGLGSAVVLPGVEAAERAGVPAFLETSAPRNLPFYERLGFTVTADVEVPEGPRTWCMTRKPGA

SEQ ID NO: 3139 - protein, 956 aa, Artificial Sequence
  Synthetic Polypeptide
MALPVTALLLPLALLLHAARPDIVMTQSPLSLPVTPGEPASISCRSSKSLLHSNGNTYLYWFQQKPGQAPRLLIYRMSNLASGVPDRFSGSGSGTAFTLKISRVEAEDVGVYYCMQHIEYPFTFGQGTKLEIKGGGGSGGGGSGGGGSQVQLVQSGPEVKKPGASVKVSCKASGYTFTNSWMNWVRQRPGKGLEWIGRIYPGDGETIYNGKFRVRVTITADESTSTAYMELSSLRSEDTAVYYCARGYDDYSFAYWGQGTTVTVSSTREQKLISEEDLAKPTTTPAPRPPTPAPTIASQPLSLRPEACRPAAGGAVHTRGLDFACDIYIWAPLAGTCGVLLLSLVITLYCKRGRKKLLYIFKQPFMRPVQTTQEEDGCSCRFPEEEEGGCELRVKFSRSADAPAYQQGQNQLYNELNLGRREEYDVLDKRRGRDPEMGGKPRRKNPQEGLYNELQKDKMAEAYSEIGMKGERRRGKGHDGLYQGLSTATKDTYDALHMQALPPRSRGSGATNFSLLKQAGDVEENPGPGIHMATYEVLCEVARKLGTDDREVVLFLLNVFIPQPTLAQLIGALRALKEEGRLTFPLLAECLFRAGRRDLLRDLLHLDPRFLERHLAGTMSYFSPYQLTVLHVDGELCARDIRSLIFLSKDTIGSRSTPQTFLHWVYCMENLDLLGPTDVDALMSMLRSLSRVDLQRQVQTLMGLHLSGPSHSQHYRHTPLETDFYDYKDDDDKTSGSGEGRGSLLTCGDVEENPGPHMTEYKPTVRLATRDDVPRAVRTLAAAFADYPATRHTVDPDRHIERVTELQELFLTRVGLDIGKVWVADDGAAVAVWTTPESVEAGAVFAEIGPRMAELSGSRLAAQQQMEGLLAPHRPKEPAWFLATVGVSPDHQGKGLGSAVVLPGVEAAERAGVPAFLETSAPRNLPFYERLGFTVTADVEVPEGPRTWCMTRKPGA

SEQ ID NO: 3140 - protein, 956 aa, Artificial Sequence
  Synthetic Polypeptide
MALPVTALLLPLALLLHAARPDEIVMTQSPATLSLSPGERATLSCRASQSVSSYLAWYQQKPGQAPRLLIYDASNRATGIPARFSGSGSGTDFTLTISSLEPEDFAVYYCHQYGSSPQTFGQGTKVEIKRGGGGSGGGGSGGGGSEVQLVQSGAEVKKPGSSVKVSCKASGGTFSSYAISWVRQAPGQGLEWMGGIIPIFGTANYAQKFQGRVTITADESTSTAYMELSSLRSEDTAVYYCAVHYGDYVFSSMDVWGQGTTVTVSSTREQKLISEEDLAKPTTTPAPRPPTPAPTIASQPLSLRPEACRPAAGGAVHTRGLDFACDIYIWAPLAGTCGVLLLSLVITLYCKRGRKKLLYIFKQPFMRPVQTTQEEDGCSCRFPEEEEGGCELRVKFSRSADAPAYQQGQNQLYNELNLGRREEYDVLDKRRGRDPEMGGKPRRKNPQEGLYNELQKDKMAEAYSEIGMKGERRRGKGHDGLYQGLSTATKDTYDALHMQALPPRSRGSGATNFSLLKQAGDVEENPGPGIHMATYEVLCEVARKLGTDDREVVLFLLNVFIPQPTLAQLIGALRALKEEGRLTFPLLAECLFRAGRRDLLRDLLHLDPRFLERHLAGTMSYFSPYQLTVLHVDGELCARDIRSLIFLSKDTIGSRSTPQTFLHWVYCMENLDLLGPTDVDALMSMLRSLSRVDLQRQVQTLMGLHLSGPSHSQHYRHTPLETDFYDYKDDDDKTSGSGEGRGSLLTCGDVEENPGPHMTEYKPTVRLATRDDVPRAVRTLAAAFADYPATRHTVDPDRHIERVTELQELFLTRVGLDIGKVWVADDGAAVAVWTTPESVEAGAVFAEIGPRMAELSGSRLAAQQQMEGLLAPHRPKEPAWFLATVGVSPDHQGKGLGSAVVLPGVEAAERAGVPAFLETSAPRNLPFYERLGFTVTADVEVPEGPRTWCMTRKPGA

SEQ ID NO: 3141 - protein, 959 aa, Artificial Sequence
  Synthetic Polypeptide
MALPVTALLLPLALLLHAARPDETTLTQSPGTLSLSPGERATLSCRASQSVSSSYLAWYQQKPGQAPRLLIYGASSRATGIPDRFSGSGSGTDFTLTISRLEPEDFAVYYCQQYGSSPRTFGQGTKVEIKRGGGGSGGGGSGGGGSEVQLVQSGAEVKKPGSSVKVSCKASGGTFSSYAISWVRQAPGQGLEWMGGIIPIFGTANYAQKFQGRVTITADESTSTAYMELSSLRSEDTAVYYCARGPEYCINGVCSLDVWGQGTTVTVSSTREQKLISEEDLAKPTTTPAPRPPTPAPTIASQPLSLRPEACRPAAGGAVHTRGLDFACDIYIWAPLAGTCGVLLLSLVITLYCKRGRKKLLYIFKQPFMRPVQTTQEEDGCSCRFPEEEEGGCELRVKFSRSADAPAYQQGQNQLYNELNLGRREEYDVLDKRRGRDPEMGGKPRRKNPQEGLYNELQKDKMAEAYSEIGMKGERRRGKGHDGLYQGLSTATKDTYDALHMQALPPRSRGSGATNFSLLKQAGDVEENPGPGIHMATYEVLCEVARKLGTDDREVVLFLLNVFIPQPTLAQLIGALRALKEEGRLTFPLLAECLFRAGRRDLLRDLLHLDPRFLERHLAGTMSYFSPYQLTVLHVDGELCARDIRSLIFLSKDTIGSRSTPQTFLHWVYCMENLDLLGPTDVDALMSMLRSLSRVDLQRQVQTLMGLHLSGPSHSQHYRHTPLETDFYDYKDDDDKTSGSGEGRGSLLTCGDVEENPGPHMTEYKPTVRLATRDDVPRAVRTLAAAFADYPATRHTVDPDRHIERVTELQELFLTRVGLDIGKVWVADDGAAVAVWTTPESVEAGAVFAEIGPRMAELSGSRLAAQQQMEGLLAPHRPKEPAWFLATVGVSPDHQGKGLGSAVVLPGVEAAERAGVPAFLETSAPRNLPFYERLGFTVTADVEVPEGPRTWCMTRKPGA

SEQ ID NO: 3142 - protein, 961 aa, Artificial Sequence
  Synthetic Polypeptide
MALPVTALLLPLALLLHAARPDIELTQSPSSLAVSAGEKVTMSCKSSQSLLNSRTRKNQLAWYQQKPGQSPELLIYWASTRQSGVPDRFTGSGSGTDFTLTISSVQAEDLAVYYCQQSYNLLTFGPGTKLEVKRGGGGSGGGGSGGGGSVKLQESGGGFVKPGGSLKVSCAASGFTFSSYAMSWVRLSPEMRLEWVATISSAGGYIFYSDSVQGRFTISRDNAKNTLHLQMGSLRSGDTAMYYCARQGFGNYGDYYAMDYWGQGTTVTVSSTREQKLISEEDLAKPTTTPAPRPPTPAPTIASQPLSLRPEACRPAAGGAVHTRGLDFACDIYIWAPLAGTCGVLLLSLVITLYCKRGRKKLLYIFKQPFMRPVQTTQEEDGCSCRFPEEEEGGCELRVKFSRSADAPAYQQGQNQLYNELNLGRREEYDVLDKRRGRDPEMGGKPRRKNPQEGLYNELQKDKMAEAYSEIGMKGERRRGKGHDGLYQGLSTATKDTYDALHMQALPPRSRGSGATNFSLLKQAGDVEENPGPGIHMATYEVLCEVARKLGTDDREVVLFLLNVFIPQPTLAQLIGALRALKEEGRLTFPLLAECLFRAGRRDLLRDLLHLDPRFLERHLAGTMSYFSPYQLTVLHVDGELCARDIRSLIFLSKDTIGSRSTPQTFLHWVYCMENLDLLGPTDVDALMSMLRSLSRVDLQRQVQTLMGLHLSGPSHSQHYRHTPLETDFYDYKDDDDKTSGSGEGRGSLLTCGDVEENPGPHMTEYKPTVRLATRDDVPRAVRTLAAAFADYPATRHTVDPDRHIERVTELQELFLTRVGLDIGKVWVADDGAAVAVWTTPESVEAGAVFAEIGPRMAELSGSRLAAQQQMEGLLAPHRPKEPAWFLATVGVSPDHQGKGLGSAVVLPGVEAAERAGVPAFLETSAPRNLPFYERLGFTVTADVEVPEGPRTWCMTRKPGA

SEQ ID NO: 3143 - protein, 960 aa, Artificial Sequence
  Synthetic Polypeptide
MALPVTALLLPLALLLHAARPDIQMTQSPSSLSASVGDRVTITCRSSQNIVHSNGNTYLDWYQQTPGKAPKLLIYKVSNRFSGVPSRFSGSGSGTDFTFTISSLQPEDIATYYCFQYSHVPWTFGQGTKLQIGGGGSGGGGSGGGGSQVQLQQSGAEVKKPGSSVKVSCKASGYTFTNYYIYWVRQAPGQGLEWIGGINPTSGGSNFNEKFKTRVTITADESSTTAYMELSSLRSEDTAFYFCTRQGLWFDSDGRGFDFWGQGTTVTVSSTREQKLISEEDLAKPTTTPAPRPPTPAPTIASQPLSLRPEACRPAAGGAVHTRGLDFACDIYIWAPLAGTCGVLLLSLVITLYCKRGRKKLLYIFKQPFMRPVQTTQEEDGCSCRFPEEEEGGCELRVKFSRSADAPAYQQGQNQLYNELNLGRREEYDVLDKRRGRDPEMGGKPRRKNPQEGLYNELQKDKMAEAYSEIGMKGERRRGKGHDGLYQGLSTATKDTYDALHMQALPPRSRGSGATNFSLLKQAGDVEENPGPGIHMATYEVLCEVARKLGTDDREVVLFLLNVFIPQPTLAQLIGALRALKEEGRLTFPLLAECLFRAGRRDLLRDLLHLDPRFLERHLAGTMSYFSPYQLTVLHVDGELCARDIRSLIFLSKDTIGSRSTPQTFLHWVYCMENLDLLGPTDVDALMSMLRSLSRVDLQRQVQTLMGLHLSGPSHSQHYRHTPLETDFYDYKDDDDKTSGSGEGRGSLLTCGDVEENPGPHMTEYKPTVRLATRDDVPRAVRTLAAAFADYPATRHTVDPDRHIERVTELQELFLTRVGLDIGKVWVADDGAAVAVWTTPESVEAGAVFAEIGPRMAELSGSRLAAQQQMEGLLAPHRPKEPAWFLATVGVSPDHQGKGLGSAVVLPGVEAAERAGVPAFLETSAPRNLPFYERLGFTVTADVEVPEGPRTWCMTRKPGA

SEQ ID NO: 3144 - protein, 856 aa, Artificial Sequence
  Synthetic Polypeptide
MALPVTALLLPLALLLHAARPLFNQEVQIPLTESYCGPCPKNWICYKNNCYQFFDESKNWYESQASCMSQNASLLKVYSKEDQDLLKLVKSYHWMGLVHIPTNGSWQWEDGSILSPNLLTIIEMQKGDCALYASSFKGYIENCSTPNTYICMQRTVGGGGSGGGGDTREQKLISEEDLAKPTTTPAPRPPTPAPTIASQPLSLRPEACRPAAGGAVHTRGLDFACDIYIWAPLAGTCGVLLLSLVITLYCKRGRKKLLYIFKQPFMRPVQTTQEEDGCSCRFPEEEEGGCELRVKFSRSADAPAYQQGQNQLYNELNLGRREEYDVLDKRRGRDPEMGGKPRRKNPQEGLYNELQKDKMAEAYSEIGMKGERRRGKGHDGLYQGLSTATKDTYDALHMQALPPRSRGSGATNFSLLKQAGDVEENPGPGIHMATYEVLCEVARKLGTDDREVVLFLLNVFIPQPTLAQLIGALRALKEEGRLTFPLLAECLFRAGRRDLLRDLLHLDPRFLERHLAGTMSYFSPYQLTVLHVDGELCARDIRSLIFLSKDTIGSRSTPQTFLHWVYCMENLDLLGPTDVDALMSMLRSLSRVDLQRQVQTLMGLHLSGPSHSQHYRHTPLETDFYDYKDDDDKTSGSGEGRGSLLTCGDVEENPGPHMTEYKPTVRLATRDDVPRAVRTLAAAFADYPATRHTVDPDRHIERVTELQELFLTRVGLDIGKVWVADDGAAVAVWTTPESVEAGAVFAEIGPRMAELSGSRLAAQQQMEGLLAPHRPKEPAWFLATVGVSPDHQGKGLGSAVVLPGVEAAERAGVPAFLETSAPRNLPFYERLGFTVTADVEVPEGPRTWCMTRKPGA

SEQ ID NO: 3145 - protein, 950 aa, Artificial Sequence
  Synthetic Polypeptide
MALPVTALLLPLALLLHAARPEIVLTQSPGTLSLSPGERATLSCRASQSVSSSYLAWYQQKPGQAPRLLIYGASSRATGIPDRFSGSGSGTDFTLTISRLEPEDFAVYYCQQYGSSPWTFGQGTKVEIKRGGGGSGGGGSGGGGSQVHLQESGPGLVKPSETLSLTCTVSDDSISSYYWSWIRQPPGKGLEWIGHISYSGSANYNPSLKSRVTISVDTSKNQFSLKLSSVTAADTAVYYCANWDDAFNIWGQGTMVTVSSTREQKLISEEDLAKPTTTPAPRPPTPAPTIASQPLSLRPEACRPAAGGAVHTRGLDFACDIYIWAPLAGTCGVLLLSLVITLYCKRGRKKLLYIFKQPFMRPVQTTQEEDGCSCRFPEEEEGGCELRVKFSRSADAPAYQQGQNQLYNELNLGRREEYDVLDKRRGRDPEMGGKPRRKNPQEGLYNELQKDKMAEAYSEIGMKGERRRGKGHDGLYQGLSTATKDTYDALHMQALPPRSRGSGATNFSLLKQAGDVEENPGPGIHMATYEVLCEVARKLGTDDREVVLFLLNVFIPQPTLAQLIGALRALKEEGRLTFPLLAECLFRAGRRDLLRDLLHLDPRFLERHLAGTMSYFSPYQLTVLHVDGELCARDIRSLIFLSKDTIGSRSTPQTFLHWVYCMENLDLLGPTDVDALMSMLRSLSRVDLQRQVQTLMGLHLSGPSHSQHYRHTPLETDFYDYKDDDDKTSGSGEGRGSLLTCGDVEENPGPHMTEYKPTVRLATRDDVPRAVRTLAAAFADYPATRHTVDPDRHIERVTELQELFLTRVGLDIGKVWVADDGAAVAVWTTPESVEAGAVFAEIGPRMAELSGSRLAAQQQMEGLLAPHRPKEPAWFLATVGVSPDHQGKGLGSAVVLPGVEAAERAGVPAFLETSAPRNLPFYERLGFTVTADVEVPEGPRTWCMTRKPGA

SEQ ID NO: 3146 - protein, 952 aa, Artificial Sequence
  Synthetic Polypeptide
MALPVTALLLPLALLLHAARPDVVMTQTPLTLSVTIGQPASISCKSSQSLLDSDGKTYLHWLLQRPGQSPKRLIFLVSKLDSGVPDRFTGSGSGTDFTLKISRVEAEDLGVYYCWQGTHFPQTFGGGTKLEIKGGGGSGGGGSGGGGSVQLQESGPDLVKPSQSLSLTCTVTGYSITSGYSWHWIRQFPGNKLEWMGYIHYSGDTDYNPSLKSRFSITRDTSKNQFFLQLNSVTTEDTATYYCATPGGFVYWGQGTLVTVSSTREQKLISEEDLAKPTTTPAPRPPTPAPTIASQPLSLRPEACRPAAGGAVHTRGLDFACDIYIWAPLAGTCGVLLLSLVITLYCKRGRKKLLYIFKQPFMRPVQTTQEEDGCSCRFPEEEEGGCELRVKFSRSADAPAYQQGQNQLYNELNLGRREEYDVLDKRRGRDPEMGGKPRRKNPQEGLYNELQKDKMAEAYSEIGMKGERRRGKGHDGLYQGLSTATKDTYDALHMQALPPRSRGSGATNFSLLKQAGDVEENPGPGIHMATYEVLCEVARKLGTDDREVVLFLLNVFIPQPTLAQLIGALRALKEEGRLTFPLLAECLFRAGRRDLLRDLLHLDPRFLERHLAGTMSYFSPYQLTVLHVDGELCARDIRSLIFLSKDTIGSRSTPQTFLHWVYCMENLDLLGPTDVDALMSMLRSLSRVDLQRQVQTLMGLHLSGPSHSQHYRHTPLETDFYDYKDDDDKTSGSGEGRGSLLTCGDVEENPGPHMTEYKPTVRLATRDDVPRAVRTLAAAFADYPATRHTVDPDRHIERVTELQELFLTRVGLDIGKVWVADDGAAVAVWTTPESVEAGAVFAEIGPRMAELSGSRLAAQQQMEGLLAPHRPKEPAWFLATVGVSPDHQGKGLGSAVVLPGVEAAERAGVPAFLETSAPRNLPFYERLGFTVTADVEVPEGPRTWCMTRKPGA

SEQ ID NO: 3147 - protein, 956 aa, Artificial Sequence
  Synthetic Polypeptide
MALPVTALLLPLALLLHAARPDQSELTQPRSVSGSPGQSVTISCTGTERDVGGYNYVSWYQQHPGKAPKLIIHDVIERSSGVPDRFSGSKSGNTASLTISGLQAEDEADYYCWSFAGGYYVFGTGTDVTVLGGGGSGGGGSGGGGSFEVQLLESGGGLVQPGGSLRLSCAASGFTFSTYQMSWVRQAPGKGLEWVSGIVSSGGSTAYADSVKGRFTISRDNSKNTLYLQMNSLRAEDTAVYYCAGELLPYYGMDVWGQGTTVTVSSTREQKLISEEDLAKPTTTPAPRPPTPAPTIASQPLSLRPEACRPAAGGAVHTRGLDFACDIYIWAPLAGTCGVLLLSLVITLYCKRGRKKLLYIFKQPFMRPVQTTQEEDGCSCRFPEEEEGGCELRVKFSRSADAPAYQQGQNQLYNELNLGRREEYDVLDKRRGRDPEMGGKPRRKNPQEGLYNELQKDKMAEAYSEIGMKGERRRGKGHDGLYQGLSTATKDTYDALHMQALPPRSRGSGATNFSLLKQAGDVEENPGPGIHMATYEVLCEVARKLGTDDREVVLFLLNVFIPQPTLAQLIGALRALKEEGRLTFPLLAECLFRAGRRDLLRDLLHLDPRFLERHLAGTMSYFSPYQLTVLHVDGELCARDIRSLIFLSKDTIGSRSTPQTFLHWVYCMENLDLLGPTDVDALMSMLRSLSRVDLQRQVQTLMGLHLSGPSHSQHYRHTPLETDFYDYKDDDDKTSGSGEGRGSLLTCGDVEENPGPHMTEYKPTVRLATRDDVPRAVRTLAAAFADYPATRHTVDPDRHIERVTELQELFLTRVGLDIGKVWVADDGAAVAVWTTPESVEAGAVFAEIGPRMAELSGSRLAAQQQMEGLLAPHRPKEPAWFLATVGVSPDHQGKGLGSAVVLPGVEAAERAGVPAFLETSAPRNLPFYERLGFTVTADVEVPEGPRTWCMTRKPGA

SEQ ID NO: 3148 - protein, 955 aa, Artificial Sequence
  Synthetic Polypeptide
MALPVTALLLPLALLLHAARPDQSELTQPRSVSGSPGQSVTISCTGTERDVGGYNYVSWYQQHPGKAPKLIIHDVIERSSGVPDRFSGSKSGNTASLTISGLQAEDEADYYCWSFAGGYYVFGTGTDVTVLGGGGSGGGGSGGGGSEVQLLESGGGLVQPGGSLRLSCAASGFTFSTYEMHWVRQAPGKGLEWVSVILSSGGETNYADSVKGRFTISRDNSKNTLYLQMNSLRAEDTAVYYCAGMLLPYYGMDVWGQGTTVTVSSTREQKLISEEDLAKPTTTPAPRPPTPAPTIASQPLSLRPEACRPAAGGAVHTRGLDFACDIYIWAPLAGTCGVLLLSLVITLYCKRGRKKLLYIFKQPFMRPVQTTQEEDGCSCRFPEEEEGGCELRVKFSRSADAPAYQQGQNQLYNELNLGRREEYDVLDKRRGRDPEMGGKPRRKNPQEGLYNELQKDKMAEAYSEIGMKGERRRGKGHDGLYQGLSTATKDTYDALHMQALPPRSRGSGATNFSLLKQAGDVEENPGPGIHMATYEVLCEVARKLGTDDREVVLFLLNVFIPQPTLAQLIGALRALKEEGRLTFPLLAECLFRAGRRDLLRDLLHLDPRFLERHLAGTMSYFSPYQLTVLHVDGELCARDIRSLIFLSKDTIGSRSTPQTFLHWVYCMENLDLLGPTDVDALMSMLRSLSRVDLQRQVQTLMGLHLSGPSHSQHYRHTPLETDFYDYKDDDDKTSGSGEGRGSLLTCGDVEENPGPHMTEYKPTVRLATRDDVPRAVRTLAAAFADYPATRHTVDPDRHIERVTELQELFLTRVGLDIGKVWVADDGAAVAVWTTPESVEAGAVFAEIGPRMAELSGSRLAAQQQMEGLLAPHRPKEPAWFLATVGVSPDHQGKGLGSAVVLPGVEAAERAGVPAFLETSAPRNLPFYERLGFTVTADVEVPEGPRTWCMTRKPGA

SEQ ID NO: 3149 - protein, 857 aa, Artificial Sequence
  Synthetic Polypeptide
MALPVTALLLPLALLLHAARPGWFLDSPDRPWNPPTFSPALLVVTEGDNATFTCSFSNTSESFVLNWYRMSPSNQTDKLAAFPEDRSQPGQDCRFRVTQLPNGRDFHMSVVRARRNDSGTYLCGAISLAPKAQIKESLRAELRVTERRAEVPTAHPSPSPRPAGQFQTREQKLISEEDLAKPTTTPAPRPPTPAPTIASQPLSLRPEACRPAAGGAVHTRGLDFACDIYIWAPLAGTCGVLLLSLVITLYCKRGRKKLLYIFKQPFMRPVQTTQEEDGCSCRFPEEEEGGCELRVKFSRSADAPAYQQGQNQLYNELNLGRREEYDVLDKRRGRDPEMGGKPRRKNPQEGLYNELQKDKMAEAYSEIGMKGERRRGKGHDGLYQGLSTATKDTYDALHMQALPPRSRGSGATNFSLLKQAGDVEENPGPGIHMATYEVLCEVARKLGTDDREVVLFLLNVFIPQPTLAQLIGALRALKEEGRLTFPLLAECLFRAGRRDLLRDLLHLDPRFLERHLAGTMSYFSPYQLTVLHVDGELCARDIRSLIFLSKDTIGSRSTPQTFLHWVYCMENLDLLGPTDVDALMSMLRSLSRVDLQRQVQTLMGLHLSGPSHSQHYRHTPLETDFYDYKDDDDKTSGSGEGRGSLLTCGDVEENPGPHMTEYKPTVRLATRDDVPRAVRTLAAAFADYPATRHTVDPDRHIERVTELQELFLTRVGLDIGKVWVADDGAAVAVWTTPESVEAGAVFAEIGPRMAELSGSRLAAQQQMEGLLAPHRPKEPAWFLATVGVSPDHQGKGLGSAVVLPGVEAAERAGVPAFLETSAPRNLPFYERLGFTVTADVEVPEGPRTWCMTRKPGA

SEQ ID NO: 3150 - protein, 952 aa, Artificial Sequence
  Synthetic Polypeptide
MALPVTALLLPLALLLHAARPDIQMTQSPSSLSASVGDRVTITCRASQDVSTAVAWYQQKPGKAPKLLIYSASFLYSGVPSRFSGSGSGTDFTLTISSLQPEDFATYYCQQYLYHPATFGQGTKVEIKRGGGGSGGGGSGGGGSEVQLVESGGGLVQPGGSLRLSCAASGFTFSDSWIHWVRQAPGKGLEWVAWISPYGGSTYYADSVKGRFTISADTSKNTAYLQMNSLRAEDTAVYYCARRHWPGGFDYWGQGTLVTVSSTREQKLISEEDLAKPTTTPAPRPPTPAPTIASQPLSLRPEACRPAAGGAVHTRGLDFACDIYIWAPLAGTCGVLLLSLVITLYCKRGRKKLLYIFKQPFMRPVQTTQEEDGCSCRFPEEEEGGCELRVKFSRSADAPAYQQGQNQLYNELNLGRREEYDVLDKRRGRDPEMGGKPRRKNPQEGLYNELQKDKMAEAYSEIGMKGERRRGKGHDGLYQGLSTATKDTYDALHMQALPPRSRGSGATNFSLLKQAGDVEENPGPGIHMATYEVLCEVARKLGTDDREVVLFLLNVFIPQPTLAQLIGALRALKEEGRLTFPLLAECLFRAGRRDLLRDLLHLDPRFLERHLAGTMSYFSPYQLTVLHVDGELCARDIRSLIFLSKDTIGSRSTPQTFLHWVYCMENLDLLGPTDVDALMSMLRSLSRVDLQRQVQTLMGLHLSGPSHSQHYRHTPLETDFYDYKDDDDKTSGSGEGRGSLLTCGDVEENPGPHMTEYKPTVRLATRDDVPRAVRTLAAAFADYPATRHTVDPDRHIERVTELQELFLTRVGLDIGKVWVADDGAAVAVWTTPESVEAGAVFAEIGPRMAELSGSRLAAQQQMEGLLAPHRPKEPAWFLATVGVSPDHQGKGLGSAVVLPGVEAAERAGVPAFLETSAPRNLPFYERLGFTVTADVEVPEGPRTWCMTRKPGA

SEQ ID NO: 3151 - protein, 953 aa, Artificial Sequence
  Synthetic Polypeptide
MALPVTALLLPLALLLHAARPAIVMTQTPSPVSAAVGGTVTINCQASESVYSNNYLSWFQQKPGQPPKLLIYLASTLASGVPSRFKGSGSGTQFTLTISGVQCDDAATYYCIGGKSSSTDGNAFGGGTEVVVRGGGGSGGGGSGGGGSQSLEESGGRLVKPDETLTITCTVSGIDLSSNGLTWVRQAPGEGLEWIGTINKDASAYYASWAKGRLTISKPSSTKVDLKITSPTTEDTATYFCGRIAFKTGTSIWGPGTLVTVSSTREQKLISEEDLAKPTTTPAPRPPTPAPTIASQPLSLRPEACRPAAGGAVHTRGLDFACDIYIWAPLAGTCGVLLLSLVITLYCKRGRKKLLYIFKQPFMRPVQTTQEEDGCSCRFPEEEEGGCELRVKFSRSADAPAYQQGQNQLYNELNLGRREEYDVLDKRRGRDPEMGGKPRRKNPQEGLYNELQKDKMAEAYSEIGMKGERRRGKGHDGLYQGLSTATKDTYDALHMQALPPRSRGSGATNFSLLKQAGDVEENPGPGIHMATYEVLCEVARKLGTDDREVVLFLLNVFIPQPTLAQLIGALRALKEEGRLTFPLLAECLFRAGRRDLLRDLLHLDPRFLERHLAGTMSYFSPYQLTVLHVDGELCARDIRSLIFLSKDTIGSRSTPQTFLHWVYCMENLDLLGPTDVDALMSMLRSLSRVDLQRQVQTLMGLHLSGPSHSQHYRHTPLETDFYDYKDDDDKTSGSGEGRGSLLTCGDVEENPGPHMTEYKPTVRLATRDDVPRAVRTLAAAFADYPATRHTVDPDRHIERVTELQELFLTRVGLDIGKVWVADDGAAVAVWTTPESVEAGAVFAEIGPRMAELSGSRLAAQQQMEGLLAPHRPKEPAWFLATVGVSPDHQGKGLGSAVVLPGVEAAERAGVPAFLETSAPRNLPFYERLGFTVTADVEVPEGPRTWCMTRKPGA

SEQ ID NO: 3152 - protein, 951 aa, Artificial Sequence
  Synthetic Polypeptide
MALPVTALLLPLALLLHAARPDIQMTQSPSSLSASVGDRVTITCRASQGISSWLAWYQQKPEKAPKSLIYAASSLQSGVPSRFSGSGSGTDFTLTISSLQPEDFATYYCQQYNSYPYTFGQGTKLEIKGGGGSGGGGSGGGGSQVQLVQSGAEVKKPGASVKVSCKASGYTFTSYDVHWVRQAPGQRLEWMGWLHADTGITKFSQKFQGRVTITRDTSASTAYMELSSLRSEDTAVYYCARERIQLWFDYWGQGTLVTVSSTREQKLISEEDLAKPTTTPAPRPPTPAPTIASQPLSLRPEACRPAAGGAVHTRGLDFACDIYIWAPLAGTCGVLLLSLVITLYCKRGRKKLLYIFKQPFMRPVQTTQEEDGCSCRFPEEEEGGCELRVKFSRSADAPAYQQGQNQLYNELNLGRREEYDVLDKRRGRDPEMGGKPRRKNPQEGLYNELQKDKMAEAYSEIGMKGERRRGKGHDGLYQGLSTATKDTYDALHMQALPPRSRGSGATNFSLLKQAGDVEENPGPGIHMATYEVLCEVARKLGTDDREVVLFLLNVFIPQPTLAQLIGALRALKEEGRLTFPLLAECLFRAGRRDLLRDLLHLDPRFLERHLAGTMSYFSPYQLTVLHVDGELCARDIRSLIFLSKDTIGSRSTPQTFLHWVYCMENLDLLGPTDVDALMSMLRSLSRVDLQRQVQTLMGLHLSGPSHSQHYRHTPLETDFYDYKDDDDKTSGSGEGRGSLLTCGDVEENPGPHMTEYKPTVRLATRDDVPRAVRTLAAAFADYPATRHTVDPDRHIERVTELQELFLTRVGLDIGKVWVADDGAAVAVWTTPESVEAGAVFAEIGPRMAELSGSRLAAQQQMEGLLAPHRPKEPAWFLATVGVSPDHQGKGLGSAVVLPGVEAAERAGVPAFLETSAPRNLPFYERLGFTVTADVEVPEGPRTWCMTRKPGA

SEQ ID NO: 3153 - protein, 970 aa, Artificial Sequence
  Synthetic Polypeptide
MALPVTALLLPLALLLHAARPDDIVMTQSPLSLPVTPGEPASISCRSSQSLLHSNGYNYLVWYLQKPGQSPQLLIYLGSIRASGVPDRFSGSGSGTDFTLKISRVEAEDVGVYYCMQPLQTPITFGQGTRLEIKRGGGGSGGGGSGGGGSGLQCVAAPRWVLSQVQLQQWGAGLLKPSETLSLTCAVYGGSFSGNYWSWIRQPPGKGLEWIGEINHSGSTNYNPSLKSRVTISVDTSKNQFSLKLSSVTAADTAVYYCARGGSYNYFDYWGQGTLVTVSSTREQKLISEEDLAKPTTTPAPRPPTPAPTIASQPLSLRPEACRPAAGGAVHTRGLDFACDIYIWAPLAGTCGVLLLSLVITLYCKRGRKKLLYIFKQPFMRPVQTTQEEDGCSCRFPEEEEGGCELRVKFSRSADAPAYQQGQNQLYNELNLGRREEYDVLDKRRGRDPEMGGKPRRKNPQEGLYNELQKDKMAEAYSEIGMKGERRRGKGHDGLYQGLSTATKDTYDALHMQALPPRSRGSGATNFSLLKQAGDVEENPGPGIHMATYEVLCEVARKLGTDDREVVLFLLNVFIPQPTLAQLIGALRALKEEGRLTFPLLAECLFRAGRRDLLRDLLHLDPRFLERHLAGTMSYFSPYQLTVLHVDGELCARDIRSLIFLSKDTIGSRSTPQTFLHWVYCMENLDLLGPTDVDALMSMLRSLSRVDLQRQVQTLMGLHLSGPSHSQHYRHTPLETDFYDYKDDDDKTSGSGEGRGSLLTCGDVEENPGPHMTEYKPTVRLATRDDVPRAVRTLAAAFADYPATRHTVDPDRHIERVTELQELFLTRVGLDIGKVWVADDGAAVAVWTTPESVEAGAVFAEIGPRMAELSGSRLAAQQQMEGLLAPHRPKEPAWFLATVGVSPDHQGKGLGSAVVLPGVEAAERAGVPAFLETSAPRNLPFYERLGFTVTADVEVPEGPRTWCMTRKPGA

SEQ ID NO: 3154 - protein, 967 aa, Artificial Sequence
  Synthetic Polypeptide
MALPVTALLLPLALLLHAARPDQLTQSPSSVSASVGDRVTITCRASRGISSWLAWYQQKPGKAPKLLIYTASSLQSGVPSRFSGSGSGTDFTLTISSLQPEDFATYYCQQAYSFPRTFGQGTKVEIKRGGGGSGGGGSGGGGSVAAPRWVLSQVQLQESGPGLVKPSQTLSLTCTVSGGSISSGGYYWIWIRQHPGKGLEWIGYIYYNGNTYYNPSLKSRVTMSVDTSKNQFSLKLSSVTAADTAVYYCARDGITMIRGYYYGMDVWGQGTTVTVSSTREQKLISEEDLAKPTTTPAPRPPTPAPTIASQPLSLRPEACRPAAGGAVHTRGLDFACDIYIWAPLAGTCGVLLLSLVITLYCKRGRKKLLYIFKQPFMRPVQTTQEEDGCSCRFPEEEEGGCELRVKFSRSADAPAYQQGQNQLYNELNLGRREEYDVLDKRRGRDPEMGGKPRRKNPQEGLYNELQKDKMAEAYSEIGMKGERRRGKGHDGLYQGLSTATKDTYDALHMQALPPRSRGSGATNFSLLKQAGDVEENPGPGIHMATYEVLCEVARKLGTDDREVVLFLLNVFIPQPTLAQLIGALRALKEEGRLTFPLLAECLFRAGRRDLLRDLLHLDPRFLERHLAGTMSYFSPYQLTVLHVDGELCARDIRSLIFLSKDTIGSRSTPQTFLHWVYCMENLDLLGPTDVDALMSMLRSLSRVDLQRQVQTLMGLHLSGPSHSQHYRHTPLETDFYDYKDDDDKTSGSGEGRGSLLTCGDVEENPGPHMTEYKPTVRLATRDDVPRAVRTLAAAFADYPATRHTVDPDRHIERVTELQELFLTRVGLDIGKVWVADDGAAVAVWTTPESVEAGAVFAEIGPRMAELSGSRLAAQQQMEGLLAPHRPKEPAWFLATVGVSPDHQGKGLGSAVVLPGVEAAERAGVPAFLETSAPRNLPFYERLGFTVTADVEVPEGPRTWCMTRKPGA

SEQ ID NO: 3155 - protein, 941 aa, Artificial Sequence
  Synthetic Polypeptide
MALPVTALLLPLALLLHAARPDIVVTQSPASLAVSLGQRATISYRASKSVSTSGYSYMHWNQQKPGQPPRLLIYLVSNLESGVPARFSGSGSGTDFTLNIHPVEEEDAATYYCQHIRELTRSEGGPSWKGGGGSGGGGSGGGGSEVKLEESGGDLVKPGGSLKLSCAASGFTFSGYGMSWVRQTPDKRLEWVATISSGGSYTYYPDSVKGRFTISRDNAKNTLYLQMSSLKSEDTAMYYCARHEGGYYGSSTREQKLISEEDLAKPTTTPAPRPPTPAPTIASQPLSLRPEACRPAAGGAVHTRGLDFACDIYIWAPLAGTCGVLLLSLVITLYCKRGRKKLLYIFKQPFMRPVQTTQEEDGCSCRFPEEEEGGCELRVKFSRSADAPAYQQGQNQLYNELNLGRREEYDVLDKRRGRDPEMGGKPRRKNPQEGLYNELQKDKMAEAYSEIGMKGERRRGKGHDGLYQGLSTATKDTYDALHMQALPPRSRGSGATNFSLLKQAGDVEENPGPGIHMATYEVLCEVARKLGTDDREVVLFLLNVFIPQPTLAQLIGALRALKEEGRLTFPLLAECLFRAGRRDLLRDLLHLDPRFLERHLAGTMSYFSPYQLTVLHVDGELCARDIRSLIFLSKDTIGSRSTPQTFLHWVYCMENLDLLGPTDVDALMSMLRSLSRVDLQRQVQTLMGLHLSGPSHSQHYRHTPLETDFYDYKDDDDKTSGSGEGRGSLLTCGDVEENPGPHMTEYKPTVRLATRDDVPRAVRTLAAAFADYPATRHTVDPDRHIERVTELQELFLTRVGLDIGKVWVADDGAAVAVWTTPESVEAGAVFAEIGPRMAELSGSRLAAQQQMEGLLAPHRPKEPAWFLATVGVSPDHQGKGLGSAVVLPGVEAAERAGVPAFLETSAPRNLPFYERLGFTVTADVEVPEGPRTWCMTRKPGA

SEQ ID NO: 3156 - protein, 957 aa, Artificial Sequence
  Synthetic Polypeptide
MALPVTALLLPLALLLHAARPDDIQMTQSPSSLSASVGDRVTITCRASQGISNYLAWYQQKTGKVPKFLIYEASTLQSGVPSRFSGGGSGTDFTLTISSLQPEDVATYYCQNYNSAPFTFGPGTKVDIKGGGGSGGGGSGGGGSQVQLVESGGGVVQPGRSLRLSCAASGFAFSRYGMHWVRQAPGKGLEWVAVIWYDGSNKYYADSVKGRFTISRDNSKNTQYLQMNSLRAEDTAVYYCARGGDFLYYYYYGMDVWGQGTTVTVSSTREQKLISEEDLAKPTTTPAPRPPTPAPTIASQPLSLRPEACRPAAGGAVHTRGLDFACDIYIWAPLAGTCGVLLLSLVITLYCKRGRKKLLYIFKQPFMRPVQTTQEEDGCSCRFPEEEEGGCELRVKFSRSADAPAYQQGQNQLYNELNLGRREEYDVLDKRRGRDPEMGGKPRRKNPQEGLYNELQKDKMAEAYSEIGMKGERRRGKGHDGLYQGLSTATKDTYDALHMQALPPRSRGSGATNFSLLKQAGDVEENPGPGIHMATYEVLCEVARKLGTDDREVVLFLLNVFIPQPTLAQLIGALRALKEEGRLTFPLLAECLFRAGRRDLLRDLLHLDPRFLERHLAGTMSYFSPYQLTVLHVDGELCARDIRSLIFLSKDTIGSRSTPQTFLHWVYCMENLDLLGPTDVDALMSMLRSLSRVDLQRQVQTLMGLHLSGPSHSQHYRHTPLETDFYDYKDDDDKTSGSGEGRGSLLTCGDVEENPGPHMTEYKPTVRLATRDDVPRAVRTLAAAFADYPATRHTVDPDRHIERVTELQELFLTRVGLDIGKVWVADDGAAVAVWTTPESVEAGAVFAEIGPRMAELSGSRLAAQQQMEGLLAPHRPKEPAWFLATVGVSPDHQGKGLGSAVVLPGVEAAERAGVPAFLETSAPRNLPFYERLGFTVTADVEVPEGPRTWCMTRKPGA

SEQ ID NO: 3157 - protein, 948 aa, Artificial Sequence
  Synthetic Polypeptide
MALPVTALLLPLALLLHAARPDIQMTQSPSSLSTSVGDRVTLTCKASQDVGTAVDWYQQKPGPSPKLLIYWASTRHTGIPSRFSGSGSGTDFTLTISSLQPEDFADYYCQQYNSYPLTFGPGTKVDIKGGGGSGGGGSGGGGSEVQLVQSGPEVKKPGATVKISCKTSGYTFTEYTIHWVKQAPGKGLEWIGNINPNNGGTTYNQKFEDKATLTVDKSTDTAYMELSSLRSEDTAVYYCAAGWNFDYWGQGTLLTVSSTREQKLISEEDLAKPTTTPAPRPPTPAPTIASQPLSLRPEACRPAAGGAVHTRGLDFACDIYIWAPLAGTCGVLLLSLVITLYCKRGRKKLLYIFKQPFMRPVQTTQEEDGCSCRFPEEEEGGCELRVKFSRSADAPAYQQGQNQLYNELNLGRREEYDVLDKRRGRDPEMGGKPRRKNPQEGLYNELQKDKMAEAYSEIGMKGERRRGKGHDGLYQGLSTATKDTYDALHMQALPPRSRGSGATNFSLLKQAGDVEENPGPGIHMATYEVLCEVARKLGTDDREVVLFLLNVFIPQPTLAQLIGALRALKEEGRLTFPLLAECLFRAGRRDLLRDLLHLDPRFLERHLAGTMSYFSPYQLTVLHVDGELCARDIRSLIFLSKDTIGSRSTPQTFLHWVYCMENLDLLGPTDVDALMSMLRSLSRVDLQRQVQTLMGLHLSGPSHSQHYRHTPLETDFYDYKDDDDKTSGSGEGRGSLLTCGDVEENPGPHMTEYKPTVRLATRDDVPRAVRTLAAAFADYPATRHTVDPDRHIERVTELQELFLTRVGLDIGKVWVADDGAAVAVWTTPESVEAGAVFAEIGPRMAELSGSRLAAQQQMEGLLAPHRPKEPAWFLATVGVSPDHQGKGLGSAVVLPGVEAAERAGVPAFLETSAPRNLPFYERLGFTVTADVEVPEGPRTWCMTRKPGA

SEQ ID NO: 3158 - protein, 949 aa, Artificial Sequence
  Synthetic Polypeptide
MALPVTALLLPLALLLHAARPDIQMTQSPSSLSASVGDRVTITCKASQDIYPYLNWFQQKPGKAPKTLIYRTNRLLDGVPSRFSGSGSGTDFTFTISSLQPYYCLQYDEFPLTFGAGTKLEIKRGGGGSGGGGSGGGGSQITLKESGPTLVKPTQTLTLTCTFSGFSLSTSNMGVGWIRQPPGKALEWLAHIWWDDDKYYSPSLKSRLTITKDTSKNQVVLTMTNMDPVDTATYYCVRSNYGYAWFAYWGQGTLVTVSSTREQKLISEEDLAKPTTTPAPRPPTPAPTIASQPLSLRPEACRPAAGGAVHTRGLDFACDIYIWAPLAGTCGVLLLSLVITLYCKRGRKKLLYIFKQPFMRPVQTTQEEDGCSCRFPEEEEGGCELRVKFSRSADAPAYQQGQNQLYNELNLGRREEYDVLDKRRGRDPEMGGKPRRKNPQEGLYNELQKDKMAEAYSEIGMKGERRRGKGHDGLYQGLSTATKDTYDALHMQALPPRSRGSGATNFSLLKQAGDVEENPGPGIHMATYEVLCEVARKLGTDDREVVLFLLNVFIPQPTLAQLIGALRALKEEGRLTFPLLAECLFRAGRRDLLRDLLHLDPRFLERHLAGTMSYFSPYQLTVLHVDGELCARDIRSLIFLSKDTIGSRSTPQTFLHWVYCMENLDLLGPTDVDALMSMLRSLSRVDLQRQVQTLMGLHLSGPSHSQHYRHTPLETDFYDYKDDDDKTSGSGEGRGSLLTCGDVEENPGPHMTEYKPTVRLATRDDVPRAVRTLAAAFADYPATRHTVDPDRHIERVTELQELFLTRVGLDIGKVWVADDGAAVAVWTTPESVEAGAVFAEIGPRMAELSGSRLAAQQQMEGLLAPHRPKEPAWFLATVGVSPDHQGKGLGSAVVLPGVEAAERAGVPAFLETSAPRNLPFYERLGFTVTADVEVPEGPRTWCMTRKPGA

SEQ ID NO: 3159 - protein, 949 aa, Artificial Sequence
  Synthetic Polypeptide
MALPVTALLLPLALLLHAARPDIVMTQSQKFMSTSVGDRVNVTCKASQNVGTNVVWYQQKTGQSPKALIHSASYRYSGVPDRFTGSGSGTDFTLTLSNVQSEDLAEYFCQHYNSFPYTFGGGTKLEIKRGGGGSGGGGSGGGGSQVQLQQSGAELVRPGVSVKISCKGSGYRFTDYPIHWVKQSHAKSLEWIGIISTYYGDVTNNPKFRGKATMTVDKSSTTAYMELARLTSEDSAIYYCARNDLFAYWGQGTLVTVSATREQKLISEEDLAKPTTTPAPRPPTPAPTIASQPLSLRPEACRPAAGGAVHTRGLDFACDIYIWAPLAGTCGVLLLSLVITLYCKRGRKKLLYIFKQPFMRPVQTTQEEDGCSCRFPEEEEGGCELRVKFSRSADAPAYQQGQNQLYNELNLGRREEYDVLDKRRGRDPEMGGKPRRKNPQEGLYNELQKDKMAEAYSEIGMKGERRRGKGHDGLYQGLSTATKDTYDALHMQALPPRSRGSGATNFSLLKQAGDVEENPGPGIHMATYEVLCEVARKLGTDDREVVLFLLNVFIPQPTLAQLIGALRALKEEGRLTFPLLAECLFRAGRRDLLRDLLHLDPRFLERHLAGTMSYFSPYQLTVLHVDGELCARDIRSLIFLSKDTIGSRSTPQTFLHWVYCMENLDLLGPTDVDALMSMLRSLSRVDLQRQVQTLMGLHLSGPSHSQHYRHTPLETDFYDYKDDDDKTSGSGEGRGSLLTCGDVEENPGPHMTEYKPTVRLATRDDVPRAVRTLAAAFADYPATRHTVDPDRHIERVTELQELFLTRVGLDIGKVWVADDGAAVAVWTTPESVEAGAVFAEIGPRMAELSGSRLAAQQQMEGLLAPHRPKEPAWFLATVGVSPDHQGKGLGSAVVLPGVEAAERAGVPAFLETSAPRNLPFYERLGFTVTADVEVPEGPRTWCMTRKPGA

SEQ ID NO: 3160 - protein, 952 aa, Artificial Sequence
  Synthetic Polypeptide
MALPVTALLLPLALLLHAARPDIKMTQSPSSMYASLGERVTITCKASPDINSYLSWFQQKPGKSPKTLIYRANRLVDGVPSRFSGGGSGQDYSLTINSLEYEDMGIYYCLQYDEFPYTFGGGTKLEMKGGGGSGGGGSGGGGSEVKLVESGGGLVKPGGSLKLSCAASGFTFSSYAMSWVRQIPEKRLEWVASISRGGTTYYPDSVKGRFTISRDNVRNILYLQMSSLRSEDTAMYYCGRYDYDGYYAMDYWGQGTSVTVSSTREQKLISEEDLAKPTTTPAPRPPTPAPTIASQPLSLRPEACRPAAGGAVHTRGLDFACDIYIWAPLAGTCGVLLLSLVITLYCKRGRKKLLYIFKQPFMRPVQTTQEEDGCSCRFPEEEEGGCELRVKFSRSADAPAYQQGQNQLYNELNLGRREEYDVLDKRRGRDPEMGGKPRRKNPQEGLYNELQKDKMAEAYSEIGMKGERRRGKGHDGLYQGLSTATKDTYDALHMQALPPRSRGSGATNFSLLKQAGDVEENPGPGIHMATYEVLCEVARKLGTDDREVVLFLLNVFIPQPTLAQLIGALRALKEEGRLTFPLLAECLFRAGRRDLLRDLLHLDPRFLERHLAGTMSYFSPYQLTVLHVDGELCARDIRSLIFLSKDTIGSRSTPQTFLHWVYCMENLDLLGPTDVDALMSMLRSLSRVDLQRQVQTLMGLHLSGPSHSQHYRHTPLETDFYDYKDDDDKTSGSGEGRGSLLTCGDVEENPGPHMTEYKPTVRLATRDDVPRAVRTLAAAFADYPATRHTVDPDRHIERVTELQELFLTRVGLDIGKVWVADDGAAVAVWTTPESVEAGAVFAEIGPRMAELSGSRLAAQQQMEGLLAPHRPKEPAWFLATVGVSPDHQGKGLGSAVVLPGVEAAERAGVPAFLETSAPRNLPFYERLGFTVTADVEVPEGPRTWCMTRKPGA

SEQ ID NO: 3161 - protein, 955 aa, Artificial Sequence
  Synthetic Polypeptide
MALPVTALLLPLALLLHAARPDDVVVTPVSCFLSCISGAEGHHLIQGQQKCQYIWLLYALEPTETRTATQTPHLSCIQPRIWGPCQVQWQWVWDRLHPQHPSCGGGGCCNLLLSAHGAYTFGGGTRLELKGGGGSGGGGSGGGGSEVKLQESGPELVKPGASVKMSCKASGYTFTSYVMHWVKQKPGQGLEWIGYINPYNDGTKYNEKFKGKATLTSDKSSSTAYMELSSLTSEDSAVYYCARWKIYYGNYEDYWGQGTPLTVSSTREQKLISEEDLAKPTTTPAPRPPTPAPTIASQPLSLRPEACRPAAGGAVHTRGLDFACDIYIWAPLAGTCGVLLLSLVITLYCKRGRKKLLYIFKQPFMRPVQTTQEEDGCSCRFPEEEEGGCELRVKFSRSADAPAYQQGQNQLYNELNLGRREEYDVLDKRRGRDPEMGGKPRRKNPQEGLYNELQKDKMAEAYSEIGMKGERRRGKGHDGLYQGLSTATKDTYDALHMQALPPRSRGSGATNFSLLKQAGDVEENPGPGIHMATYEVLCEVARKLGTDDREVVLFLLNVFIPQPTLAQLIGALRALKEEGRLTFPLLAECLFRAGRRDLLRDLLHLDPRFLERHLAGTMSYFSPYQLTVLHVDGELCARDIRSLIFLSKDTIGSRSTPQTFLHWVYCMENLDLLGPTDVDALMSMLRSLSRVDLQRQVQTLMGLHLSGPSHSQHYRHTPLETDFYDYKDDDDKTSGSGEGRGSLLTCGDVEENPGPHMTEYKPTVRLATRDDVPRAVRTLAAAFADYPATRHTVDPDRHIERVTELQELFLTRVGLDIGKVWVADDGAAVAVWTTPESVEAGAVFAEIGPRMAELSGSRLAAQQQMEGLLAPHRPKEPAWFLATVGVSPDHQGKGLGSAVVLPGVEAAERAGVPAFLETSAPRNLPFYERLGFTVTADVEVPEGPRTWCMTRKPGA

SEQ ID NO: 3162 - protein, 985 aa, Artificial Sequence
  Synthetic Polypeptide
MALPVTALLLPLALLLHAARPDEFQVQLVQSGGGLVQPGGSLRLSCAASDFDFAAYEMSWVRQAPGQGLEWVAIISHDGIDKYYTDSVKGRFTISRDNSKNTLYLQMNTLRAEDTATYYCLRLGAVGQGTLVTVSSLEGGGGSGGGGSGGGGSGSGGSGSGGSGSGGSGSGGSFEQVQLVQSGGGLVQPGGSLRLSCAASDFAFDDYEMSWVRQAPGKALEWIGDINHSGTTIYNPSLKSRVTISRDNSKNTLYLQMNTLRAEDTAIYYCARPHYGDYSDAFDIWGQGTMVTVSSTREQKLISEEDLAKPTTTPAPRPPTPAPTIASQPLSLRPEACRPAAGGAVHTRGLDFACDIYIWAPLAGTCGVLLLSLVITLYCKRGRKKLLYIFKQPFMRPVQTTQEEDGCSCRFPEEEEGGCELRVKFSRSADAPAYQQGQNQLYNELNLGRREEYDVLDKRRGRDPEMGGKPRRKNPQEGLYNELQKDKMAEAYSEIGMKGERRRGKGHDGLYQGLSTATKDTYDALHMQALPPRSRGSGATNFSLLKQAGDVEENPGPGIHMATYEVLCEVARKLGTDDREVVLFLLNVFIPQPTLAQLIGALRALKEEGRLTFPLLAECLFRAGRRDLLRDLLHLDPRFLERHLAGTMSYFSPYQLTVLHVDGELCARDIRSLIFLSKDTIGSRSTPQTFLHWVYCMENLDLLGPTDVDALMSMLRSLSRVDLQRQVQTLMGLHLSGPSHSQHYRHTPLETDFYDYKDDDDKTSGSGEGRGSLLTCGDVEENPGPHMTEYKPTVRLATRDDVPRAVRTLAAAFADYPATRHTVDPDRHIERVTELQELFLTRVGLDIGKVWVADDGAAVAVWTTPESVEAGAVFAEIGPRMAELSGSRLAAQQQMEGLLAPHRPKEPAWFLATVGVSPDHQGKGLGSAVVLPGVEAAERAGVPAFLETSAPRNLPFYERLGFTVTADVEVPEGPRTWCMTRKPGA

SEQ ID NO: 3163 - protein, 960 aa, Artificial Sequence
  Synthetic Polypeptide
MALPVTALLLPLALLLHAARPEIVMTQSPATLSVSPGERATLSCRASQSVSSNLAWYQQKPGQAPRLLIYGASTRATGIPARFSGSGSGTDFTLTISSLQSVDSAVYYCQQYNNWPPYTFGQGTKLEIKGGGGSGGGGSGGGGSQVQLLESGGGVVQPGRSLRLSCAASGFTFSFYGMHWVRQAPGKGLEWVAAISYDGSNKYYADSVKGRFTISRDNSKNTLYLQMNSLRAEDTAVYYCAKRPNQFYCSDGRCYSIDYWGQGTLVTVSSTREQKLISEEDLAKPTTTPAPRPPTPAPTIASQPLSLRPEACRPAAGGAVHTRGLDFACDIYIWAPLAGTCGVLLLSLVITLYCKRGRKKLLYIFKQPFMRPVQTTQEEDGCSCRFPEEEEGGCELRVKFSRSADAPAYQQGQNQLYNELNLGRREEYDVLDKRRGRDPEMGGKPRRKNPQEGLYNELQKDKMAEAYSEIGMKGERRRGKGHDGLYQGLSTATKDTYDALHMQALPPRSRGSGATNFSLLKQAGDVEENPGPGIHMATYEVLCEVARKLGTDDREVVLFLLNVFIPQPTLAQLIGALRALKEEGRLTFPLLAECLFRAGRRDLLRDLLHLDPRFLERHLAGTMSYFSPYQLTVLHVDGELCARDIRSLIFLSKDTIGSRSTPQTFLHWVYCMENLDLLGPTDVDALMSMLRSLSRVDLQRQVQTLMGLHLSGPSHSQHYRHTPLETDFYDYKDDDDKTSGSGEGRGSLLTCGDVEENPGPHMTEYKPTVRLATRDDVPRAVRTLAAAFADYPATRHTVDPDRHIERVTELQELFLTRVGLDIGKVWVADDGAAVAVWTTPESVEAGAVFAEIGPRMAELSGSRLAAQQQMEGLLAPHRPKEPAWFLATVGVSPDHQGKGLGSAVVLPGVEAAERAGVPAFLETSAPRNLPFYERLGFTVTADVEVPEGPRTWCMTRKPGA

SEQ ID NO: 3164 - protein, 956 aa, Artificial Sequence
  Synthetic Polypeptide
MALPVTALLLPLALLLHAARPQSVLTQPPSASAGGTPGQRVTISCSGSSSNIGSNFVYWYQQLPGTAPKLLIYRNNQRPSGVPDRFSGSRSGTSASLAGLRSEDEADYYCAADSLGGHYVFGTGTKVLGGGGSGGGGSGGGGSQVQLVESGGGSVQPGRSLRLSCEASGFTFEAYAMHWVRQPPGKGLEWVSSINWNSGRIAYADSVKGRFTISRDNARNSLYLQMNSLRLEDTAFYYCAKDIRRFSTGGAEFEYWGQGTLVTVSSTREQKLISEEDLAKPTTTPAPRPPTPAPTIASQPLSLRPEACRPAAGGAVHTRGLDFACDIYIWAPLAGTCGVLLLSLVITLYCKRGRKKLLYIFKQPFMRPVQTTQEEDGCSCRFPEEEEGGCELRVKFSRSADAPAYQQGQNQLYNELNLGRREEYDVLDKRRGRDPEMGGKPRRKNPQEGLYNELQKDKMAEAYSEIGMKGERRRGKGHDGLYQGLSTATKDTYDALHMQALPPRSRGSGATNFSLLKQAGDVEENPGPGIHMATYEVLCEVARKLGTDDREVVLFLLNVFIPQPTLAQLIGALRALKEEGRLTFPLLAECLFRAGRRDLLRDLLHLDPRFLERHLAGTMSYFSPYQLTVLHVDGELCARDIRSLIFLSKDTIGSRSTPQTFLHWVYCMENLDLLGPTDVDALMSMLRSLSRVDLQRQVQTLMGLHLSGPSHSQHYRHTPLETDFYDYKDDDDKTSGSGEGRGSLLTCGDVEENPGPHMTEYKPTVRLATRDDVPRAVRTLAAAFADYPATRHTVDPDRHIERVTELQELFLTRVGLDIGKVWVADDGAAVAVWTTPESVEAGAVFAEIGPRMAELSGSRLAAQQQMEGLLAPHRPKEPAWFLATVGVSPDHQGKGLGSAVVLPGVEAAERAGVPAFLETSAPRNLPFYERLGFTVTADVEVPEGPRTWCMTRKPGA

SEQ ID NO: 3165 - protein, 951 aa, Artificial Sequence
  Synthetic Polypeptide
MALPVTALLLPLALLLHAARPENVLTQSPAIMSASPGEKVTMTCSASSSVSYMHWYQQKSSTSPKLWIYDTSKLASGVPGRFSGSGSGNSYSLTISSMEAEDVATYYCFQGSGYPLTFGAGTKLELKGGGGSGGGGSGGGGSQVQLKESGPGLVAPSQSLSITCTVSGFSLSSQGVYWVRQPPGKGLEWLGAIWAGGSTNYNSALMSRLSISKDNSKSQVFLKMNSLQTDDTAMYYCARVDGYRGYNMDYWGQGTSVTVSSTREQKLISEEDLAKPTTTPAPRPPTPAPTIASQPLSLRPEACRPAAGGAVHTRGLDFACDIYIWAPLAGTCGVLLLSLVITLYCKRGRKKLLYIFKQPFMRPVQTTQEEDGCSCRFPEEEEGGCELRVKFSRSADAPAYQQGQNQLYNELNLGRREEYDVLDKRRGRDPEMGGKPRRKNPQEGLYNELQKDKMAEAYSEIGMKGERRRGKGHDGLYQGLSTATKDTYDALHMQALPPRSRGSGATNFSLLKQAGDVEENPGPGIHMATYEVLCEVARKLGTDDREVVLFLLNVFIPQPTLAQLIGALRALKEEGRLTFPLLAECLFRAGRRDLLRDLLHLDPRFLERHLAGTMSYFSPYQLTVLHVDGELCARDIRSLIFLSKDTIGSRSTPQTFLHWVYCMENLDLLGPTDVDALMSMLRSLSRVDLQRQVQTLMGLHLSGPSHSQHYRHTPLETDFYDYKDDDDKTSGSGEGRGSLLTCGDVEENPGPHMTEYKPTVRLATRDDVPRAVRTLAAAFADYPATRHTVDPDRHIERVTELQELFLTRVGLDIGKVWVADDGAAVAVWTTPESVEAGAVFAEIGPRMAELSGSRLAAQQQMEGLLAPHRPKEPAWFLATVGVSPDHQGKGLGSAVVLPGVEAAERAGVPAFLETSAPRNLPFYERLGFTVTADVEVPEGPRTWCMTRKPGA

SEQ ID NO: 3166 - protein, 955 aa, Artificial Sequence
  Synthetic Polypeptide
MALPVTALLLPLALLLHAARPDDIQMTQSPSSLSASVGDRVTITCRASQSISSYLNWYQQKPGKAPKLLIYDASNLETGVPSRFSGSGSGTDFTFTISSLQPEDIATYYCQQYDNLPLTFGGGTKVDIKRGGGGSGGGGSGGGGSQVQLVESGGGVVQPGRSLRLSCAASGFTFSSYAMHWVRQAPGKGLEWVAVISYDGSNKYYADSVKGRFTISRDNSKNTLYLQMNSLRAEDTAVYYCARAHNSSSWSFDYWGQGTLVTVSSTREQKLISEEDLAKPTTTPAPRPPTPAPTIASQPLSLRPEACRPAAGGAVHTRGLDFACDIYIWAPLAGTCGVLLLSLVITLYCKRGRKKLLYIFKQPFMRPVQTTQEEDGCSCRFPEEEEGGCELRVKFSRSADAPAYQQGQNQLYNELNLGRREEYDVLDKRRGRDPEMGGKPRRKNPQEGLYNELQKDKMAEAYSEIGMKGERRRGKGHDGLYQGLSTATKDTYDALHMQALPPRSRGSGATNFSLLKQAGDVEENPGPGIHMATYEVLCEVARKLGTDDREVVLFLLNVFIPQPTLAQLIGALRALKEEGRLTFPLLAECLFRAGRRDLLRDLLHLDPRFLERHLAGTMSYFSPYQLTVLHVDGELCARDIRSLIFLSKDTIGSRSTPQTFLHWVYCMENLDLLGPTDVDALMSMLRSLSRVDLQRQVQTLMGLHLSGPSHSQHYRHTPLETDFYDYKDDDDKTSGSGEGRGSLLTCGDVEENPGPHMTEYKPTVRLATRDDVPRAVRTLAAAFADYPATRHTVDPDRHIERVTELQELFLTRVGLDIGKVWVADDGAAVAVWTTPESVEAGAVFAEIGPRMAELSGSRLAAQQQMEGLLAPHRPKEPAWFLATVGVSPDHQGKGLGSAVVLPGVEAAERAGVPAFLETSAPRNLPFYERLGFTVTADVEVPEGPRTWCMTRKPGA

SEQ ID NO: 3167 - protein, 964 aa, Artificial Sequence
  Synthetic Polypeptide
MALPVTALLLPLALLLHAARPDDVVMTQSPLSLPVSLGDQASISCRSSQRLVHSNGNTYLHWYLQKPGQSPKLLIYRVSNRFPGVPDRFSGSGSGTDFTLKISRVEAEDLGIYFCSQSTHVPYTFGGGTKLEIKRGGGGSGGGGSGGGGSEVRLQQSGPDLIKPGASVKMSCKASGYTFTGYVMHWVKQRPGQGLEWIGFINPYNDDIQSNERFRGKATLTSDKSSTTAYMELSSLTSEDSAVYYCARGAGYNFDGAYRFFDFWGQGTTLTVSSTREQKLISEEDLAKPTTTPAPRPPTPAPTIASQPLSLRPEACRPAAGGAVHTRGLDFACDIYIWAPLAGTCGVLLLSLVITLYCKRGRKKLLYIFKQPFMRPVQTTQEEDGCSCRFPEEEEGGCELRVKFSRSADAPAYQQGQNQLYNELNLGRREEYDVLDKRRGRDPEMGGKPRRKNPQEGLYNELQKDKMAEAYSEIGMKGERRRGKGHDGLYQGLSTATKDTYDALHMQALPPRSRGSGATNFSLLKQAGDVEENPGPGIHMATYEVLCEVARKLGTDDREVVLFLLNVFIPQPTLAQLIGALRALKEEGRLTFPLLAECLFRAGRRDLLRDLLHLDPRFLERHLAGTMSYFSPYQLTVLHVDGELCARDIRSLIFLSKDTIGSRSTPQTFLHWVYCMENLDLLGPTDVDALMSMLRSLSRVDLQRQVQTLMGLHLSGPSHSQHYRHTPLETDFYDYKDDDDKTSGSGEGRGSLLTCGDVEENPGPHMTEYKPTVRLATRDDVPRAVRTLAAAFADYPATRHTVDPDRHIERVTELQELFLTRVGLDIGKVWVADDGAAVAVWTTPESVEAGAVFAEIGPRMAELSGSRLAAQQQMEGLLAPHRPKEPAWFLATVGVSPDHQGKGLGSAVVLPGVEAAERAGVPAFLETSAPRNLPFYERLGFTVTADVEVPEGPRTWCMTRKPGA

SEQ ID NO: 3168 - protein, 955 aa, Artificial Sequence
  Synthetic Polypeptide
MALPVTALLLPLALLLHAARPDSYELTQPPSVSVSPGQTATISCSGDQLGGKYGHWYQKKPGQSPVLVLYQDRKRPAGIPERFSGSSSGNTITLTISGTQAVDEADYYCQAWDTNLGGVFGGGTKVTVLGQGGGGSGGGGSGGGGSQVQLVESGAEVKKPGASVKVSCKASGYTFTGYYMHWVRQAPGQGLEWMGRINPNSGGTNYAQKFQGRVTMTRDTSISTAYMELSRLRSDDTAVYYCASPRGRGSAFDIWGQGTLVTVSSTREQKLISEEDLAKPTTTPAPRPPTPAPTIASQPLSLRPEACRPAAGGAVHTRGLDFACDIYIWAPLAGTCGVLLLSLVITLYCKRGRKKLLYIFKQPFMRPVQTTQEEDGCSCRFPEEEEGGCELRVKFSRSADAPAYQQGQNQLYNELNLGRREEYDVLDKRRGRDPEMGGKPRRKNPQEGLYNELQKDKMAEAYSEIGMKGERRRGKGHDGLYQGLSTATKDTYDALHMQALPPRSRGSGATNFSLLKQAGDVEENPGPGIHMATYEVLCEVARKLGTDDREVVLFLLNVFIPQPTLAQLIGALRALKEEGRLTFPLLAECLFRAGRRDLLRDLLHLDPRFLERHLAGTMSYFSPYQLTVLHVDGELCARDIRSLIFLSKDTIGSRSTPQTFLHWVYCMENLDLLGPTDVDALMSMLRSLSRVDLQRQVQTLMGLHLSGPSHSQHYRHTPLETDFYDYKDDDDKTSGSGEGRGSLLTCGDVEENPGPHMTEYKPTVRLATRDDVPRAVRTLAAAFADYPATRHTVDPDRHIERVTELQELFLTRVGLDIGKVWVADDGAAVAVWTTPESVEAGAVFAEIGPRMAELSGSRLAAQQQMEGLLAPHRPKEPAWFLATVGVSPDHQGKGLGSAVVLPGVEAAERAGVPAFLETSAPRNLPFYERLGFTVTADVEVPEGPRTWCMTRKPGA

SEQ ID NO: 3169 - protein, 958 aa, Artificial Sequence
  Synthetic Polypeptide
MALPVTALLLPLALLLHAARPDNFMLTQPHSVSESPGKTVTISCTRSSGSIASKYVQWYQQRPGSSPTTVIYEDNQRPSGVPDRFSGSIDTSSNSASLTISGLRTEDEADYYCHSYDSNNHSVFGGGTKVTVLGQGGGGSGGGGSGGGGSEVQLVESGGGVVQPGGSLRLSCAASGFTFSSYAMSWVRQAPGKGLEWVSAISGSGGSTYYADSVKGRFSISRDNSKNTLYLQMNSLRAEDTAVYYCARTRSSGAFDIWGQGTLVTVSSTREQKLISEEDLAKPTTTPAPRPPTPAPTIASQPLSLRPEACRPAAGGAVHTRGLDFACDIYIWAPLAGTCGVLLLSLVITLYCKRGRKKLLYIFKQPFMRPVQTTQEEDGCSCRFPEEEEGGCELRVKFSRSADAPAYQQGQNQLYNELNLGRREEYDVLDKRRGRDPEMGGKPRRKNPQEGLYNELQKDKMAEAYSEIGMKGERRRGKGHDGLYQGLSTATKDTYDALHMQALPPRSRGSGATNFSLLKQAGDVEENPGPGIHMATYEVLCEVARKLGTDDREVVLFLLNVFIPQPTLAQLIGALRALKEEGRLTFPLLAECLFRAGRRDLLRDLLHLDPRFLERHLAGTMSYFSPYQLTVLHVDGELCARDIRSLIFLSKDTIGSRSTPQTFLHWVYCMENLDLLGPTDVDALMSMLRSLSRVDLQRQVQTLMGLHLSGPSHSQHYRHTPLETDFYDYKDDDDKTSGSGEGRGSLLTCGDVEENPGPHMTEYKPTVRLATRDDVPRAVRTLAAAFADYPATRHTVDPDRHIERVTELQELFLTRVGLDIGKVWVADDGAAVAVWTTPESVEAGAVFAEIGPRMAELSGSRLAAQQQMEGLLAPHRPKEPAWFLATVGVSPDHQGKGLGSAVVLPGVEAAERAGVPAFLETSAPRNLPFYERLGFTVTADVEVPEGPRTWCMTRKPGA

SEQ ID NO: 3170 - protein, 953 aa, Artificial Sequence
  Synthetic Polypeptide
MALPVTALLLPLALLLHAARPDIQMNQSPSSLSASLGDTITITCHASQNINVWLSWYQQKPGNIPKLLIYKASNLHTGVPSRFSGSGSGTGFTITISSLQPEDIATYYCQQGQSYPWTFGGGTKLEIKRGGGGSGGGGSGGGGSEVQLQQSGPELVKPGASVKISCKASGYSFTGYFMNWVKQSHGKSLEYIGRFNPYNGETLYNQKFKGKATLTVDKSSSTVHMELLSVTSEDSAVYYCGRSGNDDAMDYWGQGTSVTVSSATREQKLISEEDLAKPTTTPAPRPPTPAPTIASQPLSLRPEACRPAAGGAVHTRGLDFACDIYIWAPLAGTCGVLLLSLVITLYCKRGRKKLLYIFKQPFMRPVQTTQEEDGCSCRFPEEEEGGCELRVKFSRSADAPAYQQGQNQLYNELNLGRREEYDVLDKRRGRDPEMGGKPRRKNPQEGLYNELQKDKMAEAYSEIGMKGERRRGKGHDGLYQGLSTATKDTYDALHMQALPPRSRGSGATNFSLLKQAGDVEENPGPGIHMATYEVLCEVARKLGTDDREVVLFLLNVFIPQPTLAQLIGALRALKEEGRLTFPLLAECLFRAGRRDLLRDLLHLDPRFLERHLAGTMSYFSPYQLTVLHVDGELCARDIRSLIFLSKDTIGSRSTPQTFLHWVYCMENLDLLGPTDVDALMSMLRSLSRVDLQRQVQTLMGLHLSGPSHSQHYRHTPLETDFYDYKDDDDKTSGSGEGRGSLLTCGDVEENPGPHMTEYKPTVRLATRDDVPRAVRTLAAAFADYPATRHTVDPDRHIERVTELQELFLTRVGLDIGKVWVADDGAAVAVWTTPESVEAGAVFAEIGPRMAELSGSRLAAQQQMEGLLAPHRPKEPAWFLATVGVSPDHQGKGLGSAVVLPGVEAAERAGVPAFLETSAPRNLPFYERLGFTVTADVEVPEGPRTWCMTRKPGA

SEQ ID NO: 3171 - protein, 954 aa, Artificial Sequence
  Synthetic Polypeptide
MALPVTALLLPLALLLHAARPDDIQMTQSPSILSASVGDRVTITCRASQRFGDYLAWYQQKPGQAPKLLIYGASTLQSGVPSRFSGSGSGTEFTLTISGLQPEDFATYYCQQANSFPITFGKGTRLDIRRGGGGSGGGGSGGGGSQVQLVQSGAEVKKPGSSVKVSCKASGGTFSSYAISWVRQAPGQGLEWMGWINVGNGNAIYSQKFQGRVTITRDTSATTAYMELSSLRSEDTAVYYCARDGERAWDLDYWGQGTLVTVSSTREQKLISEEDLAKPTTTPAPRPPTPAPTIASQPLSLRPEACRPAAGGAVHTRGLDFACDIYIWAPLAGTCGVLLLSLVITLYCKRGRKKLLYIFKQPFMRPVQTTQEEDGCSCRFPEEEEGGCELRVKFSRSADAPAYQQGQNQLYNELNLGRREEYDVLDKRRGRDPEMGGKPRRKNPQEGLYNELQKDKMAEAYSEIGMKGERRRGKGHDGLYQGLSTATKDTYDALHMQALPPRSRGSGATNFSLLKQAGDVEENPGPGIHMATYEVLCEVARKLGTDDREVVLFLLNVFIPQPTLAQLIGALRALKEEGRLTFPLLAECLFRAGRRDLLRDLLHLDPRFLERHLAGTMSYFSPYQLTVLHVDGELCARDIRSLIFLSKDTIGSRSTPQTFLHWVYCMENLDLLGPTDVDALMSMLRSLSRVDLQRQVQTLMGLHLSGPSHSQHYRHTPLETDFYDYKDDDDKTSGSGEGRGSLLTCGDVEENPGPHMTEYKPTVRLATRDDVPRAVRTLAAAFADYPATRHTVDPDRHIERVTELQELFLTRVGLDIGKVWVADDGAAVAVWTTPESVEAGAVFAEIGPRMAELSGSRLAAQQQMEGLLAPHRPKEPAWFLATVGVSPDHQGKGLGSAVVLPGVEAAERAGVPAFLETSAPRNLPFYERLGFTVTADVEVPEGPRTWCMTRKPGA

SEQ ID NO: 3172 - protein, 959 aa, Artificial Sequence
  Synthetic Polypeptide
MALPVTALLLPLALLLHAARPDETTLTQSPGTLSLSPGERATLSCRASQSVSSSYLAWYQQKPGQAPRLLIYGASSRATGIPDRFSGSGSGTDFTLTISRLEPEDFAVYYCQQYGSSPYTFGQGTKLEIKRGGGGSGGGGSGGGGSQVQLVQSGGGVVQPGRSLRLSCAASGFTFSSYAMHWVRQAPGKGLEWVAVISYDGSNKYYADSVKGRFTISRDNSKNTLYLQMNSLRAEDTAVYYCARELRFLEWSSDAFDIWGQGTMVTVSSTREQKLISEEDLAKPTTTPAPRPPTPAPTIASQPLSLRPEACRPAAGGAVHTRGLDFACDIYIWAPLAGTCGVLLLSLVITLYCKRGRKKLLYIFKQPFMRPVQTTQEEDGCSCRFPEEEEGGCELRVKFSRSADAPAYQQGQNQLYNELNLGRREEYDVLDKRRGRDPEMGGKPRRKNPQEGLYNELQKDKMAEAYSEIGMKGERRRGKGHDGLYQGLSTATKDTYDALHMQALPPRSRGSGATNFSLLKQAGDVEENPGPGIHMATYEVLCEVARKLGTDDREVVLFLLNVFIPQPTLAQLIGALRALKEEGRLTFPLLAECLFRAGRRDLLRDLLHLDPRFLERHLAGTMSYFSPYQLTVLHVDGELCARDIRSLIFLSKDTIGSRSTPQTFLHWVYCMENLDLLGPTDVDALMSMLRSLSRVDLQRQVQTLMGLHLSGPSHSQHYRHTPLETDFYDYKDDDDKTSGSGEGRGSLLTCGDVEENPGPHMTEYKPTVRLATRDDVPRAVRTLAAAFADYPATRHTVDPDRHIERVTELQELFLTRVGLDIGKVWVADDGAAVAVWTTPESVEAGAVFAEIGPRMAELSGSRLAAQQQMEGLLAPHRPKEPAWFLATVGVSPDHQGKGLGSAVVLPGVEAAERAGVPAFLETSAPRNLPFYERLGFTVTADVEVPEGPRTWCMTRKPGA

SEQ ID NO: 3173 - protein, 954 aa, Artificial Sequence
  Synthetic Polypeptide
MALPVTALLLPLALLLHAARPEIVLTQSPATLSLSPGERATLSCRASQSVRSYLAWYQQKPGQAPRLLIYDASNRATGIPARFSGSGSGTDFTLTISSLEPEDFAVYYCQQRSNWPPTFGQGTKVEIKGGGGSGGGGSGGGGSQLQVQESGPGLVKPSETLSLTCTVSGGSISNSYFSWGWIRQPPGKGLEWIGSFYYGEKTYYNPSLKSRATISIDTSKSQFSLKLSSVTAADTAVYYCPRGPTMIRGVIDSWGQGTLVTVSSTREQKLISEEDLAKPTTTPAPRPPTPAPTIASQPLSLRPEACRPAAGGAVHTRGLDFACDIYIWAPLAGTCGVLLLSLVITLYCKRGRKKLLYIFKQPFMRPVQTTQEEDGCSCRFPEEEEGGCELRVKFSRSADAPAYQQGQNQLYNELNLGRREEYDVLDKRRGRDPEMGGKPRRKNPQEGLYNELQKDKMAEAYSEIGMKGERRRGKGHDGLYQGLSTATKDTYDALHMQALPPRSRGSGATNFSLLKQAGDVEENPGPGIHMATYEVLCEVARKLGTDDREVVLFLLNVFIPQPTLAQLIGALRALKEEGRLTFPLLAECLFRAGRRDLLRDLLHLDPRFLERHLAGTMSYFSPYQLTVLHVDGELCARDIRSLIFLSKDTIGSRSTPQTFLHWVYCMENLDLLGPTDVDALMSMLRSLSRVDLQRQVQTLMGLHLSGPSHSQHYRHTPLETDFYDYKDDDDKTSGSGEGRGSLLTCGDVEENPGPHMTEYKPTVRLATRDDVPRAVRTLAAAFADYPATRHTVDPDRHIERVTELQELFLTRVGLDIGKVWVADDGAAVAVWTTPESVEAGAVFAEIGPRMAELSGSRLAAQQQMEGLLAPHRPKEPAWFLATVGVSPDHQGKGLGSAVVLPGVEAAERAGVPAFLETSAPRNLPFYERLGFTVTADVEVPEGPRTWCMTRKPGA

SEQ ID NO: 3174 - protein, 951 aa, Artificial Sequence
  Synthetic Polypeptide
MALPVTALLLPLALLLHAARPDIQMTQSPSSLSASVGDRVTITCRASQGISSWLAWYQQKPEKAPKSLIYAASSLQSGVPSRFSGSGSGTDFTLTISSLQPEDFATYYCQQYNSYPYTFGQGTKLEIKGGGGSGGGGSGGGGSQVQLVQSGAEVRKPGSSVKVSCKASGGSFNNYPIFWVRQAPGQGFEWMGRIIPILGITAYAQKFQGRVTITADKSTSTAYMELNSLRSEDTAVYYCAGGDDLDAFDIWGQGTMVSVSSTREQKLISEEDLAKPTTTPAPRPPTPAPTIASQPLSLRPEACRPAAGGAVHTRGLDFACDIYIWAPLAGTCGVLLLSLVITLYCKRGRKKLLYIFKQPFMRPVQTTQEEDGCSCRFPEEEEGGCELRVKFSRSADAPAYQQGQNQLYNELNLGRREEYDVLDKRRGRDPEMGGKPRRKNPQEGLYNELQKDKMAEAYSEIGMKGERRRGKGHDGLYQGLSTATKDTYDALHMQALPPRSRGSGATNFSLLKQAGDVEENPGPGIHMATYEVLCEVARKLGTDDREVVLFLLNVFIPQPTLAQLIGALRALKEEGRLTFPLLAECLFRAGRRDLLRDLLHLDPRFLERHLAGTMSYFSPYQLTVLHVDGELCARDIRSLIFLSKDTIGSRSTPQTFLHWVYCMENLDLLGPTDVDALMSMLRSLSRVDLQRQVQTLMGLHLSGPSHSQHYRHTPLETDFYDYKDDDDKTSGSGEGRGSLLTCGDVEENPGPHMTEYKPTVRLATRDDVPRAVRTLAAAFADYPATRHTVDPDRHIERVTELQELFLTRVGLDIGKVWVADDGAAVAVWTTPESVEAGAVFAEIGPRMAELSGSRLAAQQQMEGLLAPHRPKEPAWFLATVGVSPDHQGKGLGSAVVLPGVEAAERAGVPAFLETSAPRNLPFYERLGFTVTADVEVPEGPRTWCMTRKPGA

SEQ ID NO: 3175 - protein, 963 aa, Artificial Sequence
  Synthetic Polypeptide
MALPVTALLLPLALLLHAARPDIVMTQTPLSLPVTPGEPASISCRSSRSLLDSDDGNTYLDWYLQKPGQSPQLLIYTLSYRASGVPDRFSGSGSGTDFTLKISRVEAEDVGVYYCMQRVEFPITFGQGTRLEIKRGGGGSGGGGSGGGGSQVQLVESGGGVVQPGRSLRLSCAASGFIFSRYGMHWVRQAPGKGLKWVAVIWYDGSNKLYADSVKGRFTISRDNSKNTLYLQMNSLRAEDTAVYYCARDYYDNSRHHWGFDYWGQGTLVTVSSTREQKLISEEDLAKPTTTPAPRPPTPAPTIASQPLSLRPEACRPAAGGAVHTRGLDFACDIYIWAPLAGTCGVLLLSLVITLYCKRGRKKLLYIFKQPFMRPVQTTQEEDGCSCRFPEEEEGGCELRVKFSRSADAPAYQQGQNQLYNELNLGRREEYDVLDKRRGRDPEMGGKPRRKNPQEGLYNELQKDKMAEAYSEIGMKGERRRGKGHDGLYQGLSTATKDTYDALHMQALPPRSRGSGATNFSLLKQAGDVEENPGPGIHMATYEVLCEVARKLGTDDREVVLFLLNVFIPQPTLAQLIGALRALKEEGRLTFPLLAECLFRAGRRDLLRDLLHLDPRFLERHLAGTMSYFSPYQLTVLHVDGELCARDIRSLIFLSKDTIGSRSTPQTFLHWVYCMENLDLLGPTDVDALMSMLRSLSRVDLQRQVQTLMGLHLSGPSHSQHYRHTPLETDFYDYKDDDDKTSGSGEGRGSLLTCGDVEENPGPHMTEYKPTVRLATRDDVPRAVRTLAAAFADYPATRHTVDPDRHIERVTELQELFLTRVGLDIGKVWVADDGAAVAVWTTPESVEAGAVFAEIGPRMAELSGSRLAAQQQMEGLLAPHRPKEPAWFLATVGVSPDHQGKGLGSAVVLPGVEAAERAGVPAFLETSAPRNLPFYERLGFTVTADVEVPEGPRTWCMTRKPGA

SEQ ID NO: 3176 - protein, 953 aa, Artificial Sequence
  Synthetic Polypeptide
MALPVTALLLPLALLLHAARPEIQMTQSPSSMSASLGDTITITCQATQDIFKNLNWYQQKPGKPPSLLIYYATELAEGVPSRFSGSGSGSDYSLTISNLESEDFAAYYCLQFFEFPFTFGSGTKLEMKGGGGSGGGGSGGGGSQVQLQQSGAELVRPGTSVKVSCKASGYVFTNYWIEWIKQRPGQGLEWIGVMNPGSGETTYNEKFKGKATLTADKSSSTAYMQLSSLTSVDSAVYFCARDHDRDYYAMDYWGQGTSVTVSSTREQKLISEEDLAKPTTTPAPRPPTPAPTIASQPLSLRPEACRPAAGGAVHTRGLDFACDIYIWAPLAGTCGVLLLSLVITLYCKRGRKKLLYIFKQPFMRPVQTTQEEDGCSCRFPEEEEGGCELRVKFSRSADAPAYQQGQNQLYNELNLGRREEYDVLDKRRGRDPEMGGKPRRKNPQEGLYNELQKDKMAEAYSEIGMKGERRRGKGHDGLYQGLSTATKDTYDALHMQALPPRSRGSGATNFSLLKQAGDVEENPGPGIHMATYEVLCEVARKLGTDDREVVLFLLNVFIPQPTLAQLIGALRALKEEGRLTFPLLAECLFRAGRRDLLRDLLHLDPRFLERHLAGTMSYFSPYQLTVLHVDGELCARDIRSLIFLSKDTIGSRSTPQTFLHWVYCMENLDLLGPTDVDALMSMLRSLSRVDLQRQVQTLMGLHLSGPSHSQHYRHTPLETDFYDYKDDDDKTSGSGEGRGSLLTCGDVEENPGPHMTEYKPTVRLATRDDVPRAVRTLAAAFADYPATRHTVDPDRHIERVTELQELFLTRVGLDIGKVWVADDGAAVAVWTTPESVEAGAVFAEIGPRMAELSGSRLAAQQQMEGLLAPHRPKEPAWFLATVGVSPDHQGKGLGSAVVLPGVEAAERAGVPAFLETSAPRNLPFYERLGFTVTADVEVPEGPRTWCMTRKPGA

SEQ ID NO: 3177 - protein, 950 aa, Artificial Sequence
  Synthetic Polypeptide
MALPVTALLLPLALLLHAARPDILLTQSPAILSVSPGERVSFSCRASQNIGTSIHWYQQRTNGSPRLLIKYASESVSGIPSRFSGSGSGTDFTLSINSVESEDIADYYCQHTNSWPTTFGGGTKLEIKRGGGGSGGGGSGGGGSQVQLQQSDAELVKPGASVKISCKASGYTFTDHAIHWVKQKPEQGLEWIGYFSPGNGDIKYNEKFKGKATLTADKSSSTAYMQLNSLTSEDSAVYFCKRSYGNYDYWGQGTTLTVSSTREQKLISEEDLAKPTTTPAPRPPTPAPTIASQPLSLRPEACRPAAGGAVHTRGLDFACDIYIWAPLAGTCGVLLLSLVITLYCKRGRKKLLYIFKQPFMRPVQTTQEEDGCSCRFPEEEEGGCELRVKFSRSADAPAYQQGQNQLYNELNLGRREEYDVLDKRRGRDPEMGGKPRRKNPQEGLYNELQKDKMAEAYSEIGMKGERRRGKGHDGLYQGLSTATKDTYDALHMQALPPRSRGSGATNFSLLKQAGDVEENPGPGIHMATYEVLCEVARKLGTDDREVVLFLLNVFIPQPTLAQLIGALRALKEEGRLTFPLLAECLFRAGRRDLLRDLLHLDPRFLERHLAGTMSYFSPYQLTVLHVDGELCARDIRSLIFLSKDTIGSRSTPQTFLHWVYCMENLDLLGPTDVDALMSMLRSLSRVDLQRQVQTLMGLHLSGPSHSQHYRHTPLETDFYDYKDDDDKTSGSGEGRGSLLTCGDVEENPGPHMTEYKPTVRLATRDDVPRAVRTLAAAFADYPATRHTVDPDRHIERVTELQELFLTRVGLDIGKVWVADDGAAVAVWTTPESVEAGAVFAEIGPRMAELSGSRLAAQQQMEGLLAPHRPKEPAWFLATVGVSPDHQGKGLGSAVVLPGVEAAERAGVPAFLETSAPRNLPFYERLGFTVTADVEVPEGPRTWCMTRKPGA

SEQ ID NO: 3178 - protein, 955 aa, Artificial Sequence
  Synthetic Polypeptide
MALPVTALLLPLALLLHAARPDIVMTQSPDSLAVSLGERATINCKSSQSLLNSGDQKNYLTWYQQKPGQPPKLLIYWASTRESGVPDRFSGSGSGTDFTLTISSLQAEDVAVYYCQNDYSYPLTFGQGTKVEIKGGGGSGGGGSGGGGSQVQLVQSGAEVKKTGSSVKVSCKASGYTFTDHAIHVWRQAPGQALEWMGHFSPGNTDIKYNDKFKGRVTLTVDRSMSTAYMELSSLRSEDTAMYYCKTSTFFFDYWGQGTMVTVSSTREQKLISEEDLAKPTTTPAPRPPTPAPTIASQPLSLRPEACRPAAGGAVHTRGLDFACDIYIWAPLAGTCGVLLLSLVITLYCKRGRKKLLYIFKQPFMRPVQTTQEEDGCSCRFPEEEEGGCELRVKFSRSADAPAYQQGQNQLYNELNLGRREEYDVLDKRRGRDPEMGGKPRRKNPQEGLYNELQKDKMAEAYSEIGMKGERRRGKGHDGLYQGLSTATKDTYDALHMQALPPRSRGSGATNFSLLKQAGDVEENPGPGIHMATYEVLCEVARKLGTDDREVVLFLLNVFIPQPTLAQLIGALRALKEEGRLTFPLLAECLFRAGRRDLLRDLLHLDPRFLERHLAGTMSYFSPYQLTVLHVDGELCARDIRSLIFLSKDTIGSRSTPQTFLHWVYCMENLDLLGPTDVDALMSMLRSLSRVDLQRQVQTLMGLHLSGPSHSQHYRHTPLETDFYDYKDDDDKTSGSGEGRGSLLTCGDVEENPGPHMTEYKPTVRLATRDDVPRAVRTLAAAFADYPATRHTVDPDRHIERVTELQELFLTRVGLDIGKVWVADDGAAVAVWTTPESVEAGAVFAEIGPRMAELSGSRLAAQQQMEGLLAPHRPKEPAWFLATVGVSPDHQGKGLGSAVVLPGVEAAERAGVPAFLETSAPRNLPFYERLGFTVTADVEVPEGPRTWCMTRKPGA

SEQ ID NO: 3179 - protein, 877 aa, Artificial Sequence
  Synthetic Polypeptide
MELTELLLVVMLLLTARLTLSSPAPPACDLRVLSKLLRDSHVLHSRLSQCPEVHPLPTPVLLPAVDFSLGEWKTQMEETKAQDILGAVTLLLEGVMAARGQLGPTCLSSLLGQLSGQVRLLLGALQSLLGTQLPPQGRTTAHKDPNAIFLSFQHLLRGKVRFLMLVGGSTLCVRRAPPTTAVPSRTSTREQKLISEEDLAKPTTTPAPRPPTPAPTIASQPLSLRPEACRPAAGGAVHTRGLDFACDIYIWAPLAGTCGVLLLSLVITLYCKRGRKKLLYIFKQPFMRPVQTTQEEDGCSCRFPEEEEGGCELRVKFSRSADAPAYQQGQNQLYNELNLGRREEYDVLDKRRGRDPEMGGKPRRKNPQEGLYNELQKDKMAEAYSEIGMKGERRRGKGHDGLYQGLSTATKDTYDALHMQALPPRSRGSGATNFSLLKQAGDVEENPGPGIHMATYEVLCEVARKLGTDDREVVLFLLNVFIPQPTLAQLIGALRALKEEGRLTFPLLAECLFRAGRRDLLRDLLHLDPRFLERHLAGTMSYFSPYQLTVLHVDGELCARDIRSLIFLSKDTIGSRSTPQTFLHWVYCMENLDLLGPTDVDALMSMLRSLSRVDLQRQVQTLMGLHLSGPSHSQHYRHTPLETDFYDYKDDDDKTSGSGEGRGSLLTCGDVEENPGPHMTEYKPTVRLATRDDVPRAVRTLAAAFADYPATRHTVDPDRHIERVTELQELFLTRVGLDIGKVWVADDGAAVAVWTTPESVEAGAVFAEIGPRMAELSGSRLAAQQQMEGLLAPHRPKEPAWFLATVGVSPDHQGKGLGSAVVLPGVEAAERAGVPAFLETSAPRNLPFYERLGFTVTADVEVPEGPRTWCMTRKPGA

SEQ ID NO: 3180 - protein, 954 aa, Artificial Sequence
  Synthetic Polypeptide
MALPVTALLLPLALLLHAARPDIQMTQSPSSLSASVGDRVTITCKASQDVSIAVAWYQQKPGKAPKVLIYSASYRYTGVPDRFSGSGSGTDFTFTISSLQPEDIAVYYCQQHYITPLTFGGGTKVEIKGGGGSGGGGSGGGGSQIQLVQSGHEVKKPGASVKVSCKASGYTFTNYGMNWVRQAPGQGLEWMGWINTKTGEPTYAEEFKGRFVFSLETSASTAYLQISSLKAEDTAMYFCGRGGYGSSYWYFDVWGQGTTVTVSSTREQKLISEEDLAKPTTTPAPRPPTPAPTIASQPLSLRPEACRPAAGGAVHTRGLDFACDIYIWAPLAGTCGVLLLSLVITLYCKRGRKKLLYIFKQPFMRPVQTTQEEDGCSCRFPEEEEGGCELRVKFSRSADAPAYQQGQNQLYNELNLGRREEYDVLDKRRGRDPEMGGKPRRKNPQEGLYNELQKDKMAEAYSEIGMKGERRRGKGHDGLYQGLSTATKDTYDALHMQALPPRSRGSGATNFSLLKQAGDVEENPGPGIHMATYEVLCEVARKLGTDDREVVLFLLNVFIPQPTLAQLIGALRALKEEGRLTFPLLAECLFRAGRRDLLRDLLHLDPRFLERHLAGTMSYFSPYQLTVLHVDGELCARDIRSLIFLSKDTIGSRSTPQTFLHWVYCMENLDLLGPTDVDALMSMLRSLSRVDLQRQVQTLMGLHLSGPSHSQHYRHTPLETDFYDYKDDDDKTSGSGEGRGSLLTCGDVEENPGPHMTEYKPTVRLATRDDVPRAVRTLAAAFADYPATRHTVDPDRHIERVTELQELFLTRVGLDIGKVWVADDGAAVAVWTTPESVEAGAVFAEIGPRMAELSGSRLAAQQQMEGLLAPHRPKEPAWFLATVGVSPDHQGKGLGSAVVLPGVEAAERAGVPAFLETSAPRNLPFYERLGFTVTADVEVPEGPRTWCMTRKPGA

SEQ ID NO: 3181 - protein, 956 aa, Artificial Sequence
  Synthetic Polypeptide
MALPVTALLLPLALLLHAARPDIVMTQSPDSLAVSLGERATINCRASKSVSTSGYSYMHWYQQKPGQPPKLLIYLASNLESGVPDRFSGSGSGTDFTLTISSLQAEDVAVYYCQHSRELPYTFGQGTKLEIKGGGGSGGGGSGGGGSQVQLQESGPGLVKPSETLSLTCTVSGGSISSYGVHWIRQPPGKGLEWIGVIWTSGVTDYNSALMGRVTISVDTSKNQFSLKLSSVTAADTAVYYCARDGDYDRYTMDYWGQGTLVTVSSTREQKLISEEDLAKPTTTPAPRPPTPAPTIASQPLSLRPEACRPAAGGAVHTRGLDFACDIYIWAPLAGTCGVLLLSLVITLYCKRGRKKLLYIFKQPFMRPVQTTQEEDGCSCRFPEEEEGGCELRVKFSRSADAPAYQQGQNQLYNELNLGRREEYDVLDKRRGRDPEMGGKPRRKNPQEGLYNELQKDKMAEAYSEIGMKGERRRGKGHDGLYQGLSTATKDTYDALHMQALPPRSRGSGATNFSLLKQAGDVEENPGPGIHMATYEVLCEVARKLGTDDREVVLFLLNVFIPQPTLAQLIGALRALKEEGRLTFPLLAECLFRAGRRDLLRDLLHLDPRFLERHLAGTMSYFSPYQLTVLHVDGELCARDIRSLIFLSKDTIGSRSTPQTFLHWVYCMENLDLLGPTDVDALMSMLRSLSRVDLQRQVQTLMGLHLSGPSHSQHYRHTPLETDFYDYKDDDDKTSGSGEGRGSLLTCGDVEENPGPHMTEYKPTVRLATRDDVPRAVRTLAAAFADYPATRHTVDPDRHIERVTELQELFLTRVGLDIGKVWVADDGAAVAVWTTPESVEAGAVFAEIGPRMAELSGSRLAAQQQMEGLLAPHRPKEPAWFLATVGVSPDHQGKGLGSAVVLPGVEAAERAGVPAFLETSAPRNLPFYERLGFTVTADVEVPEGPRTWCMTRKPGA

SEQ ID NO: 3182 - protein, 935 aa, Artificial Sequence
  Synthetic Polypeptide
MTALFLMSMLFGLACGQAMSFCIPTEYTMHIERRECAYCLTINTTICAGYCMTRDINGKLFLPKYALSQDVCTYRDFIYRTVEIPGCPLHVAPYFSYPVALSCKCGKCNTDYSDCIHEAIKTNYCTKPQKSYLVGFSVGGGGSGGGGSGGGGSAPDVQDCPECTLQENPFFSQPGAPILQCMGCCFSRAYPTPLRSKKTMLVQKNVTSESTCCVAKSYNRVTVMGGFKVENHTACHCSTCYYHKSTREQKLISEEDLAKPTTTPAPRPPTPAPTIASQPLSLRPEACRPAAGGAVHTRGLDFACDIYIWAPLAGTCGVLLLSLVITLYCKRGRKKLLYIFKQPFMRPVQTTQEEDGCSCRFPEEEEGGCELRVKFSRSADAPAYQQGQNQLYNELNLGRREEYDVLDKRRGRDPEMGGKPRRKNPQEGLYNELQKDKMAEAYSEIGMKGERRRGKGHDGLYQGLSTATKDTYDALHMQALPPRSRGSGATNFSLLKQAGDVEENPGPGIHMATYEVLCEVARKLGTDDREVVLFLLNVFIPQPTLAQLIGALRALKEEGRLTFPLLAECLFRAGRRDLLRDLLHLDPRFLERHLAGTMSYFSPYQLTVLHVDGELCARDIRSLIFLSKDTIGSRSTPQTFLHWVYCMENLDLLGPTDVDALMSMLRSLSRVDLQRQVQTLMGLHLSGPSHSQHYRHTPLETDFYDYKDDDDKTSGSGEGRGSLLTCGDVEENPGPHMTEYKPTVRLATRDDVPRAVRTLAAAFADYPATRHTVDPDRHIERVTELQELFLTRVGLDIGKVWVADDGAAVAVWTTPESVEAGAVFAEIGPRMAELSGSRLAAQQQMEGLLAPHRPKEPAWFLATVGVSPDHQGKGLGSAVVLPGVEAAERAGVPAFLETSAPRNLPFYERLGFTVTADVEVPEGPRTWCMTRKPGA

SEQ ID NO: 3183 - protein, 952 aa, Artificial Sequence
  Synthetic Polypeptide
MALPVTALLLPLALLLHAARPQSVLTQPPSVSVSPGQTASITCSGDKLGDKYACWYQQKPGQSPVLVIYQDSKRPSGIPERFSGSNSGNTATLTISGTQAMDEADYYCQAWDSSTAVVFGGGTKLTVLGGGGSGGGGSGGGGSQVQLVQSGAEVKKPGQSLKISCKASGYSLTDNWIGWVRQKPGKGLEWMGIIYPGDSDTRYSPSFQGQVTISADKSINTAYLQWSSLKASDTAIYYCVGLDWNYNPLRYWGPGTLVTVSSTREQKLISEEDLAKPTTTPAPRPPTPAPTIASQPLSLRPEACRPAAGGAVHTRGLDFACDIYIWAPLAGTCGVLLLSLVITLYCKRGRKKLLYIFKQPFMRPVQTTQEEDGCSCRFPEEEEGGCELRVKFSRSADAPAYQQGQNQLYNELNLGRREEYDVLDKRRGRDPEMGGKPRRKNPQEGLYNELQKDKMAEAYSEIGMKGERRRGKGHDGLYQGLSTATKDTYDALHMQALPPRSRGSGATNFSLLKQAGDVEENPGPGIHMATYEVLCEVARKLGTDDREVVLFLLNVFIPQPTLAQLIGALRALKEEGRLTFPLLAECLFRAGRRDLLRDLLHLDPRFLERHLAGTMSYFSPYQLTVLHVDGELCARDIRSLIFLSKDTIGSRSTPQTFLHWVYCMENLDLLGPTDVDALMSMLRSLSRVDLQRQVQTLMGLHLSGPSHSQHYRHTPLETDFYDYKDDDDKTSGSGEGRGSLLTCGDVEENPGPHMTEYKPTVRLATRDDVPRAVRTLAAAFADYPATRHTVDPDRHIERVTELQELFLTRVGLDIGKVWVADDGAAVAVWTTPESVEAGAVFAEIGPRMAELSGSRLAAQQQMEGLLAPHRPKEPAWFLATVGVSPDHQGKGLGSAVVLPGVEAAERAGVPAFLETSAPRNLPFYERLGFTVTADVEVPEGPRTWCMTRKPGA

SEQ ID NO: 3184 - protein, 950 aa, Artificial Sequence
  Synthetic Polypeptide
MALPVTALLLPLALLLHAARPDIVMTQSQKFMSTSVGDRVSIICKASQNVGTFVAWYQQKPGQSPKLLVYSASNRYTGVPDRFTGSGSGTDFTLTINNMQSEDLADYFCRQYSSYPYTFGGGTKLEIKGGGGSGGGGSGGGGSEVQLQQSGPELVKPGASMKISCKASGYSFSAYTMNWVKQSHGKNLEWIGLINPYNGGTNYNQEFEGKATLTVNKSSNTAFMELLSLTSDDSAVYYCARRDWDYFDYWGQGTTLTVSSTREQKLISEEDLAKPTTTPAPRPPTPAPTIASQPLSLRPEACRPAAGGAVHTRGLDFACDIYIWAPLAGTCGVLLLSLVITLYCKRGRKKLLYIFKQPFMRPVQTTQEEDGCSCRFPEEEEGGCELRVKFSRSADAPAYQQGQNQLYNELNLGRREEYDVLDKRRGRDPEMGGKPRRKNPQEGLYNELQKDKMAEAYSEIGMKGERRRGKGHDGLYQGLSTATKDTYDALHMQALPPRSRGSGATNFSLLKQAGDVEENPGPGIHMATYEVLCEVARKLGTDDREVVLFLLNVFIPQPTLAQLIGALRALKEEGRLTFPLLAECLFRAGRRDLLRDLLHLDPRFLERHLAGTMSYFSPYQLTVLHVDGELCARDIRSLIFLSKDTIGSRSTPQTFLHWVYCMENLDLLGPTDVDALMSMLRSLSRVDLQRQVQTLMGLHLSGPSHSQHYRHTPLETDFYDYKDDDDKTSGSGEGRGSLLTCGDVEENPGPHMTEYKPTVRLATRDDVPRAVRTLAAAFADYPATRHTVDPDRHIERVTELQELFLTRVGLDIGKVWVADDGAAVAVWTTPESVEAGAVFAEIGPRMAELSGSRLAAQQQMEGLLAPHRPKEPAWFLATVGVSPDHQGKGLGSAVVLPGVEAAERAGVPAFLETSAPRNLPFYERLGFTVTADVEVPEGPRTWCMTRKPGA

SEQ ID NO: 3185 - protein, 961 aa, Artificial Sequence
  Synthetic Polypeptide
MALPVTALLLPLALLLHAARPAIQMTQSPSSLSASVGDRVTITCRASQSISNYLNWYQQKPGKAPKLLIYAASSLQSGVPSRFSGSGSGTDFTLTISSLQPEDFATYYCQQSYSSPSTTFGQGTKLEIKRGGGGSGGGGSGGGGSEVQLVESGGGLIQPGGSLRLSCAASGFTVSSNYMSWVRQAPGKGLEWVSVTYSGGSTSYADSVKGRFTISRDNSKNTLYLQMNSLRAEDTAVYYCARGGRYCSSISCYARSGCDYWGQGTLVTVSSTREQKLISEEDLAKPTTTPAPRPPTPAPTIASQPLSLRPEACRPAAGGAVHTRGLDFACDIYIWAPLAGTCGVLLLSLVITLYCKRGRKKLLYIFKQPFMRPVQTTQEEDGCSCRFPEEEEGGCELRVKFSRSADAPAYQQGQNQLYNELNLGRREEYDVLDKRRGRDPEMGGKPRRKNPQEGLYNELQKDKMAEAYSEIGMKGERRRGKGHDGLYQGLSTATKDTYDALHMQALPPRSRGSGATNFSLLKQAGDVEENPGPGIHMATYEVLCEVARKLGTDDREVVLFLLNVFIPQPTLAQLIGALRALKEEGRLTFPLLAECLFRAGRRDLLRDLLHLDPRFLERHLAGTMSYFSPYQLTVLHVDGELCARDIRSLIFLSKDTIGSRSTPQTFLHWVYCMENLDLLGPTDVDALMSMLRSLSRVDLQRQVQTLMGLHLSGPSHSQHYRHTPLETDFYDYKDDDDKTSGSGEGRGSLLTCGDVEENPGPHMTEYKPTVRLATRDDVPRAVRTLAAAFADYPATRHTVDPDRHIERVTELQELFLTRVGLDIGKVWVADDGAAVAVWTTPESVEAGAVFAEIGPRMAELSGSRLAAQQQMEGLLAPHRPKEPAWFLATVGVSPDHQGKGLGSAVVLPGVEAAERAGVPAFLETSAPRNLPFYERLGFTVTADVEVPEGPRTWCMTRKPGA

SEQ ID NO: 3186 - protein, 956 aa, Artificial Sequence
  Synthetic Polypeptide
MALPVTALLLPLALLLHAARPDIQMTQSPSSLSASVGDRVTITCRASQSIGTSLHWYQQKPGKAPKLLIKFASRLQSGVPSRFSGSGSGTDFTLTISSLQPEDFATYYCQQSPGFPPTFGQGTKLEIKRGGGGSGGGGSGGGGSQVQLVESGGGLVKPGGSLRLSCAASGFSITTSGYYWTWIRQFPGKGLEWMGYIGYNSKTYYNPALKSRITISRDNAKNSLYLQMNSLRAEDTAVYYCARSLYGGYKDAFDSWGQGTLVTVSSTREQKLISEEDLAKPTTTPAPRPPTPAPTIASQPLSLRPEACRPAAGGAVHTRGLDFACDIYIWAPLAGTCGVLLLSLVITLYCKRGRKKLLYIFKQPFMRPVQTTQEEDGCSCRFPEEEEGGCELRVKFSRSADAPAYQQGQNQLYNELNLGRREEYDVLDKRRGRDPEMGGKPRRKNPQEGLYNELQKDKMAEAYSEIGMKGERRRGKGHDGLYQGLSTATKDTYDALHMQALPPRSRGSGATNFSLLKQAGDVEENPGPGIHMATYEVLCEVARKLGTDDREVVLFLLNVFIPQPTLAQLIGALRALKEEGRLTFPLLAECLFRAGRRDLLRDLLHLDPRFLERHLAGTMSYFSPYQLTVLHVDGELCARDIRSLIFLSKDTIGSRSTPQTFLHWVYCMENLDLLGPTDVDALMSMLRSLSRVDLQRQVQTLMGLHLSGPSHSQHYRHTPLETDFYDYKDDDDKTSGSGEGRGSLLTCGDVEENPGPHMTEYKPTVRLATRDDVPRAVRTLAAAFADYPATRHTVDPDRHIERVTELQELFLTRVGLDIGKVWVADDGAAVAVWTTPESVEAGAVFAEIGPRMAELSGSRLAAQQQMEGLLAPHRPKEPAWFLATVGVSPDHQGKGLGSAVVLPGVEAAERAGVPAFLETSAPRNLPFYERLGFTVTADVEVPEGPRTWCMTRKPGA

SEQ ID NO: 3187 - protein, 961 aa, Artificial Sequence
  Synthetic Polypeptide
MALPVTALLLPLALLLHAARPDEIVLTQSPLSLPVTPGEPASISCRSSQSLLHSIGYNYLDWYLQKPGQSPQLLIYLGSNRASGVPDRFSGSGSGTDFTLKISRVEAEDVGVYYCMQALQTPLTFGGGTKVEIKRGGGGSGGGGSGGGGSEVQLVESGGGVVQPGRSLRLSCAASGFTFRSYGMHWVRQAPGKGLEWVAVISYDGSNKYYTDSVNGRFTISRDNSKNTLYLQMNSLRAEDTAVYYCARGGGYYETSGPDYWGQGTLVTVSSTREQKLISEEDLAKPTTTPAPRPPTPAPTIASQPLSLRPEACRPAAGGAVHTRGLDFACDIYIWAPLAGTCGVLLLSLVITLYCKRGRKKLLYIFKQPFMRPVQTTQEEDGCSCRFPEEEEGGCELRVKFSRSADAPAYQQGQNQLYNELNLGRREEYDVLDKRRGRDPEMGGKPRRKNPQEGLYNELQKDKMAEAYSEIGMKGERRRGKGHDGLYQGLSTATKDTYDALHMQALPPRSRGSGATNFSLLKQAGDVEENPGPGIHMATYEVLCEVARKLGTDDREVVLFLLNVFIPQPTLAQLIGALRALKEEGRLTFPLLAECLFRAGRRDLLRDLLHLDPRFLERHLAGTMSYFSPYQLTVLHVDGELCARDIRSLIFLSKDTIGSRSTPQTFLHWVYCMENLDLLGPTDVDALMSMLRSLSRVDLQRQVQTLMGLHLSGPSHSQHYRHTPLETDFYDYKDDDDKTSGSGEGRGSLLTCGDVEENPGPHMTEYKPTVRLATRDDVPRAVRTLAAAFADYPATRHTVDPDRHIERVTELQELFLTRVGLDIGKVWVADDGAAVAVWTTPESVEAGAVFAEIGPRMAELSGSRLAAQQQMEGLLAPHRPKEPAWFLATVGVSPDHQGKGLGSAVVLPGVEAAERAGVPAFLETSAPRNLPFYERLGFTVTADVEVPEGPRTWCMTRKPGA

SEQ ID NO: 3188 - protein, 959 aa, Artificial Sequence
  Synthetic Polypeptide
MALPVTALLLPLALLLHAARPDDVVMTQSPLSLPVTPGEPASISCRSSQSLLHSIGYNYLHWFLQKPGQSPQLLIYLGSNRASGVPDRFSGSGSGTDFTLKISRVEAEDVGVYYCMQALQTPPTFGQGTRLEIKRGGGGSGGGGSGGGGSQLQLQESGPGLVKPSGTLSLTCAVSGGSISSSNWWSWVRQPPGKGLEWIGEIYHSGSTNYNPSLKSRVTISVDKSKNQFSLKLSSVTAADTAVYYCVGSPYGDYVLDYWGQGTLVTVSSTREQKLISEEDLAKPTTTPAPRPPTPAPTIASQPLSLRPEACRPAAGGAVHTRGLDFACDIYIWAPLAGTCGVLLLSLVITLYCKRGRKKLLYIFKQPFMRPVQTTQEEDGCSCRFPEEEEGGCELRVKFSRSADAPAYQQGQNQLYNELNLGRREEYDVLDKRRGRDPEMGGKPRRKNPQEGLYNELQKDKMAEAYSEIGMKGERRRGKGHDGLYQGLSTATKDTYDALHMQALPPRSRGSGATNFSLLKQAGDVEENPGPGIHMATYEVLCEVARKLGTDDREVVLFLLNVFIPQPTLAQLIGALRALKEEGRLTFPLLAECLFRAGRRDLLRDLLHLDPRFLERHLAGTMSYFSPYQLTVLHVDGELCARDIRSLIFLSKDTIGSRSTPQTFLHWVYCMENLDLLGPTDVDALMSMLRSLSRVDLQRQVQTLMGLHLSGPSHSQHYRHTPLETDFYDYKDDDDKTSGSGEGRGSLLTCGDVEENPGPHMTEYKPTVRLATRDDVPRAVRTLAAAFADYPATRHTVDPDRHIERVTELQELFLTRVGLDIGKVWVADDGAAVAVWTTPESVEAGAVFAEIGPRMAELSGSRLAAQQQMEGLLAPHRPKEPAWFLATVGVSPDHQGKGLGSAVVLPGVEAAERAGVPAFLETSAPRNLPFYERLGFTVTADVEVPEGPRTWCMTRKPGA

SEQ ID NO: 3189 - protein, 962 aa, Artificial Sequence
  Synthetic Polypeptide
MALPVTALLLPLALLLHAARPDVVMTQSPLSLPVTPGEPASISCRSSQSLLHSNGHNYLDWYLQKPGQSPQLLIYLGSNRASGVPDRFSGSGSGTDFTLKISRVEAEDVGVYYCMQTLQTPLTFGPGTKVDIKRGGGGSGGGGSGGGGSEVQLVETGGGVVQPGRSLRLSCAASGFTFSSYGMHWVRQAPGKGLEWVAVISYDGSNKYYADSVKGRFTISRDNSKNTLYLQMNSLRAEDTAVYYCAKDRYGWGSSFGHFDYWGQGTLVTVSSTREQKLISEEDLAKPTTTPAPRPPTPAPTIASQPLSLRPEACRPAAGGAVHTRGLDFACDIYIWAPLAGTCGVLLLSLVITLYCKRGRKKLLYIFKQPFMRPVQTTQEEDGCSCRFPEEEEGGCELRVKFSRSADAPAYQQGQNQLYNELNLGRREEYDVLDKRRGRDPEMGGKPRRKNPQEGLYNELQKDKMAEAYSEIGMKGERRRGKGHDGLYQGLSTATKDTYDALHMQALPPRSRGSGATNFSLLKQAGDVEENPGPGIHMATYEVLCEVARKLGTDDREVVLFLLNVFIPQPTLAQLIGALRALKEEGRLTFPLLAECLFRAGRRDLLRDLLHLDPRFLERHLAGTMSYFSPYQLTVLHVDGELCARDIRSLIFLSKDTIGSRSTPQTFLHWVYCMENLDLLGPTDVDALMSMLRSLSRVDLQRQVQTLMGLHLSGPSHSQHYRHTPLETDFYDYKDDDDKTSGSGEGRGSLLTCGDVEENPGPHMTEYKPTVRLATRDDVPRAVRTLAAAFADYPATRHTVDPDRHIERVTELQELFLTRVGLDIGKVWVADDGAAVAVWTTPESVEAGAVFAEIGPRMAELSGSRLAAQQQMEGLLAPHRPKEPAWFLATVGVSPDHQGKGLGSAVVLPGVEAAERAGVPAFLETSAPRNLPFYERLGFTVTADVEVPEGPRTWCMTRKPGA

SEQ ID NO: 3190 - protein, 957 aa, Artificial Sequence
  Synthetic Polypeptide
MALPVTALLLPLALLLHAARPDEIVLTQSPGTLSLSLGERATLSCRASQSISSSFLAWYQQKPGQAPKLLIYAASTRATGIPDRFSGSGSGTDFTLTISRLEPEDFAVYYCQQYGRSLSFGGGTKVEVKGGGGSGGGGSGGGGSQVQLQQSGPGLVKPSQTLSLTCAISGDSVSGNSATWNWIRQSPSRGLEWLGRTYYRSKWNHDYAESVKSRITINPDTSKNQFSLQLNSVTPEDTAVYYCARGDSSSWYAFDYWGQGTLVTVSSTREQKLISEEDLAKPTTTPAPRPPTPAPTIASQPLSLRPEACRPAAGGAVHTRGLDFACDIYIWAPLAGTCGVLLLSLVITLYCKRGRKKLLYIFKQPFMRPVQTTQEEDGCSCRFPEEEEGGCELRVKFSRSADAPAYQQGQNQLYNELNLGRREEYDVLDKRRGRDPEMGGKPRRKNPQEGLYNELQKDKMAEAYSEIGMKGERRRGKGHDGLYQGLSTATKDTYDALHMQALPPRSRGSGATNFSLLKQAGDVEENPGPGIHMATYEVLCEVARKLGTDDREVVLFLLNVFIPQPTLAQLIGALRALKEEGRLTFPLLAECLFRAGRRDLLRDLLHLDPRFLERHLAGTMSYFSPYQLTVLHVDGELCARDIRSLIFLSKDTIGSRSTPQTFLHWVYCMENLDLLGPTDVDALMSMLRSLSRVDLQRQVQTLMGLHLSGPSHSQHYRHTPLETDFYDYKDDDDKTSGSGEGRGSLLTCGDVEENPGPHMTEYKPTVRLATRDDVPRAVRTLAAAFADYPATRHTVDPDRHIERVTELQELFLTRVGLDIGKVWVADDGAAVAVWTTPESVEAGAVFAEIGPRMAELSGSRLAAQQQMEGLLAPHRPKEPAWFLATVGVSPDHQGKGLGSAVVLPGVEAAERAGVPAFLETSAPRNLPFYERLGFTVTADVEVPEGPRTWCMTRKPGA

SEQ ID NO: 3191 - protein, 957 aa, Artificial Sequence
  Synthetic Polypeptide
MALPVTALLLPLALLLHAARPDQTVVTQPPSASGTPGQRVTISCSGSSSNIGSNYVYWYQQLPGTAPKLLIYRSNQRPSGVPDRFSGSKSGTSASLAISGPRSVDEADYYCAAWDDSLNGVVFGGGTKLTVLGGGGGSGGGGSGGGGSQVQLVQSGAEVKKPGSSVKVSCKASGGTFSSYAISWVRQAPGQGLEWMGGIIPIFGTANYAQKFQGRVTITADESTSTAYMELSSLRSEDTAVYYCARRIPPYYGMDVWGQGTTVTVSSTREQKLISEEDLAKPTTTPAPRPPTPAPTIASQPLSLRPEACRPAAGGAVHTRGLDFACDIYIWAPLAGTCGVLLLSLVITLYCKRGRKKLLYIFKQPFMRPVQTTQEEDGCSCRFPEEEEGGCELRVKFSRSADAPAYQQGQNQLYNELNLGRREEYDVLDKRRGRDPEMGGKPRRKNPQEGLYNELQKDKMAEAYSEIGMKGERRRGKGHDGLYQGLSTATKDTYDALHMQALPPRSRGSGATNFSLLKQAGDVEENPGPGIHMATYEVLCEVARKLGTDDREVVLFLLNVFIPQPTLAQLIGALRALKEEGRLTFPLLAECLFRAGRRDLLRDLLHLDPRFLERHLAGTMSYFSPYQLTVLHVDGELCARDIRSLIFLSKDTIGSRSTPQTFLHWVYCMENLDLLGPTDVDALMSMLRSLSRVDLQRQVQTLMGLHLSGPSHSQHYRHTPLETDFYDYKDDDDKTSGSGEGRGSLLTCGDVEENPGPHMTEYKPTVRLATRDDVPRAVRTLAAAFADYPATRHTVDPDRHIERVTELQELFLTRVGLDIGKVWVADDGAAVAVWTTPESVEAGAVFAEIGPRMAELSGSRLAAQQQMEGLLAPHRPKEPAWFLATVGVSPDHQGKGLGSAVVLPGVEAAERAGVPAFLETSAPRNLPFYERLGFTVTADVEVPEGPRTWCMTRKPGA

SEQ ID NO: 3192 - protein, 957 aa, Artificial Sequence
  Synthetic Polypeptide
MALPVTALLLPLALLLHAARPDQSVVTQPPSVSVAPGKTARITCGRNNIGSKSVHWYQQKPGQAPVLVVYDDSDRPSGIPERFSGSNSGNTATLTISRVEAGDEADYYCQVWDSSSDHVVFGGGTKLTVLGGGGGSGGGGSGGGGSEVQLVQSGGGVVRPGGSLRLSCAASGFTFDDYGMSWVRQAPGKGLEWVSGINWNGGSTGYADSVRGRFTISRDNAKNSLYLQMNSLRAEDTALYYCARERGYGYHDPHDYWGQGTLVTVSSTREQKLISEEDLAKPTTTPAPRPPTPAPTIASQPLSLRPEACRPAAGGAVHTRGLDFACDIYIWAPLAGTCGVLLLSLVITLYCKRGRKKLLYIFKQPFMRPVQTTQEEDGCSCRFPEEEEGGCELRVKFSRSADAPAYQQGQNQLYNELNLGRREEYDVLDKRRGRDPEMGGKPRRKNPQEGLYNELQKDKMAEAYSEIGMKGERRRGKGHDGLYQGLSTATKDTYDALHMQALPPRSRGSGATNFSLLKQAGDVEENPGPGIHMATYEVLCEVARKLGTDDREVVLFLLNVFIPQPTLAQLIGALRALKEEGRLTFPLLAECLFRAGRRDLLRDLLHLDPRFLERHLAGTMSYFSPYQLTVLHVDGELCARDIRSLIFLSKDTIGSRSTPQTFLHWVYCMENLDLLGPTDVDALMSMLRSLSRVDLQRQVQTLMGLHLSGPSHSQHYRHTPLETDFYDYKDDDDKTSGSGEGRGSLLTCGDVEENPGPHMTEYKPTVRLATRDDVPRAVRTLAAAFADYPATRHTVDPDRHIERVTELQELFLTRVGLDIGKVWVADDGAAVAVWTTPESVEAGAVFAEIGPRMAELSGSRLAAQQQMEGLLAPHRPKEPAWFLATVGVSPDHQGKGLGSAVVLPGVEAAERAGVPAFLETSAPRNLPFYERLGFTVTADVEVPEGPRTWCMTRKPGA

SEQ ID NO: 3193 - protein, 969 aa, Artificial Sequence
  Synthetic Polypeptide
MALPVTALLLPLALLLHAARPEQKLISEEDLEFQAVVTQPPSASGTPGQRVTISCSGSSSNIGSNTVNWYQQVPGTAPKLLIYSNNQRPSGVPDRFSGSKSGTSASLAISGLQSEDEADYYCAAWDDSLNGWVFGGGTKLTVLGGGGSGGGGSGGGGSQMQLVQSGAEVKEPGESLRISCKGSGYSFTNFWISWVRQMPGKGLEWMGRVDPGYSYSTYSPSFQGHVTISADKSTSTAYLQWNSLKASDTAMYYCARVQYSGYYDWFDPWGQGTLVTVSSTREQKLISEEDLAKPTTTPAPRPPTPAPTIASQPLSLRPEACRPAAGGAVHTRGLDFACDIYIWAPLAGTCGVLLLSLVITLYCKRGRKKLLYIFKQPFMRPVQTTQEEDGCSCRFPEEEEGGCELRVKFSRSADAPAYQQGQNQLYNELNLGRREEYDVLDKRRGRDPEMGGKPRRKNPQEGLYNELQKDKMAEAYSEIGMKGERRRGKGHDGLYQGLSTATKDTYDALHMQALPPRSRGSGATNFSLLKQAGDVEENPGPGIHMATYEVLCEVARKLGTDDREVVLFLLNVFIPQPTLAQLIGALRALKEEGRLTFPLLAECLFRAGRRDLLRDLLHLDPRFLERHLAGTMSYFSPYQLTVLHVDGELCARDIRSLIFLSKDTIGSRSTPQTFLHWVYCMENLDLLGPTDVDALMSMLRSLSRVDLQRQVQTLMGLHLSGPSHSQHYRHTPLETDFYDYKDDDDKTSGSGEGRGSLLTCGDVEENPGPHMTEYKPTVRLATRDDVPRAVRTLAAAFADYPATRHTVDPDRHIERVTELQELFLTRVGLDIGKVWVADDGAAVAVWTTPESVEAGAVFAEIGPRMAELSGSRLAAQQQMEGLLAPHRPKEPAWFLATVGVSPDHQGKGLGSAVVLPGVEAAERAGVPAFLETSAPRNLPFYERLGFTVTADVEVPEGPRTWCMTRKPGA

SEQ ID NO: 3194 - protein, 963 aa, Artificial Sequence
  Synthetic Polypeptide
MALPVTALLLPLALLLHAARPEQKLISEEDLEFDIQMTQSPSTLSASVGDRVTITCRASQNINKWLAWYQQRPGKAPQLLIYKASSLESGVPSRFSGSGSGTEYTLTISSLQPDDFATYYCQQYNSYATFGQGTKVEIKRGGGGSGGGGSGGGGSQVQLVQSGAEVKKPGESLKISCKGSGYNFSNKWIGWVRQLPGRGLEWIAIIYPGYSDITYSPSFQGRVTISADTSINTAYLHWHSLKASDTAMYYCVRHTALAGFDYWGLGTLVTVSSTREQKLISEEDLAKPTTTPAPRPPTPAPTIASQPLSLRPEACRPAAGGAVHTRGLDFACDIYIWAPLAGTCGVLLLSLVITLYCKRGRKKLLYIFKQPFMRPVQTTQEEDGCSCRFPEEEEGGCELRVKFSRSADAPAYQQGQNQLYNELNLGRREEYDVLDKRRGRDPEMGGKPRRKNPQEGLYNELQKDKMAEAYSEIGMKGERRRGKGHDGLYQGLSTATKDTYDALHMQALPPRSRGSGATNFSLLKQAGDVEENPGPGIHMATYEVLCEVARKLGTDDREVVLFLLNVFIPQPTLAQLIGALRALKEEGRLTFPLLAECLFRAGRRDLLRDLLHLDPRFLERHLAGTMSYFSPYQLTVLHVDGELCARDIRSLIFLSKDTIGSRSTPQTFLHWVYCMENLDLLGPTDVDALMSMLRSLSRVDLQRQVQTLMGLHLSGPSHSQHYRHTPLETDFYDYKDDDDKTSGSGEGRGSLLTCGDVEENPGPHMTEYKPTVRLATRDDVPRAVRTLAAAFADYPATRHTVDPDRHIERVTELQELFLTRVGLDIGKVWVADDGAAVAVWTTPESVEAGAVFAEIGPRMAELSGSRLAAQQQMEGLLAPHRPKEPAWFLATVGVSPDHQGKGLGSAVVLPGVEAAERAGVPAFLETSAPRNLPFYERLGFTVTADVEVPEGPRTWCMTRKPGA

SEQ ID NO: 3195 - protein, 953 aa, Artificial Sequence
  Synthetic Polypeptide
MALPVTALLLPLALLLHAARPEIVLTQSPGTLSLSPGERATLSCRASQSVSNTYLAWYHQRPGQAPRLLIYGASSRATGIPDRFSGSGSGTDFALTISSLEPEDFAVYYCQQYSNSWTFGQGTKVEIKRGGGGSGGGGSGGGGSQVQLVESGGGVVQPGRSLRLSCAASGFTFSSYDMHWVRQAPGKGLEWVAVISYDGTNEYYADSVKGRFTISRDTSKNTLYLQMNSLRAEDTAVYYCARERYFDWSFDYWGQGTLVSVSSTREQKLISEEDLAKPTTTPAPRPPTPAPTIASQPLSLRPEACRPAAGGAVHTRGLDFACDIYIWAPLAGTCGVLLLSLVITLYCKRGRKKLLYIFKQPFMRPVQTTQEEDGCSCRFPEEEEGGCELRVKFSRSADAPAYQQGQNQLYNELNLGRREEYDVLDKRRGRDPEMGGKPRRKNPQEGLYNELQKDKMAEAYSEIGMKGERRRGKGHDGLYQGLSTATKDTYDALHMQALPPRSRGSGATNFSLLKQAGDVEENPGPGIHMATYEVLCEVARKLGTDDREVVLFLLNVFIPQPTLAQLIGALRALKEEGRLTFPLLAECLFRAGRRDLLRDLLHLDPRFLERHLAGTMSYFSPYQLTVLHVDGELCARDIRSLIFLSKDTIGSRSTPQTFLHWVYCMENLDLLGPTDVDALMSMLRSLSRVDLQRQVQTLMGLHLSGPSHSQHYRHTPLETDFYDYKDDDDKTSGSGEGRGSLLTCGDVEENPGPHMTEYKPTVRLATRDDVPRAVRTLAAAFADYPATRHTVDPDRHIERVTELQELFLTRVGLDIGKVWVADDGAAVAVWTTPESVEAGAVFAEIGPRMAELSGSRLAAQQQMEGLLAPHRPKEPAWFLATVGVSPDHQGKGLGSAVVLPGVEAAERAGVPAFLETSAPRNLPFYERLGFTVTADVEVPEGPRTWCMTRKPGA

SEQ ID NO: 3196 - protein, 952 aa, Artificial Sequence
  Synthetic Polypeptide
MALPVTALLLPLALLLHAARPELTQDPAVSVALGQTVRITCQGDSLRSNYANWYQQKPGQAPVLVIYGQNNRPSGIPDRFSGSSSGNTASLTITGAQAADEADYYCDSRVSTGNHVVFGGGTKLTVLGQGGGGSGGGGSGGGGSEVQLVQSGAEVKKPGASVKVSCKASGYTFTSYAMHWVRQAPGQRLEWMGWINAGNGNTKYSQKFQGRVTITRDTSASTAYMELSSLRSEDTAVYYCARDISYGSFDYWGQGTLVTVSSTREQKLISEEDLAKPTTTPAPRPPTPAPTIASQPLSLRPEACRPAAGGAVHTRGLDFACDIYIWAPLAGTCGVLLLSLVITLYCKRGRKKLLYIFKQPFMRPVQTTQEEDGCSCRFPEEEEGGCELRVKFSRSADAPAYQQGQNQLYNELNLGRREEYDVLDKRRGRDPEMGGKPRRKNPQEGLYNELQKDKMAEAYSEIGMKGERRRGKGHDGLYQGLSTATKDTYDALHMQALPPRSRGSGATNFSLLKQAGDVEENPGPGIHMATYEVLCEVARKLGTDDREVVLFLLNVFIPQPTLAQLIGALRALKEEGRLTFPLLAECLFRAGRRDLLRDLLHLDPRFLERHLAGTMSYFSPYQLTVLHVDGELCARDIRSLIFLSKDTIGSRSTPQTFLHWVYCMENLDLLGPTDVDALMSMLRSLSRVDLQRQVQTLMGLHLSGPSHSQHYRHTPLETDFYDYKDDDDKTSGSGEGRGSLLTCGDVEENPGPHMTEYKPTVRLATRDDVPRAVRTLAAAFADYPATRHTVDPDRHIERVTELQELFLTRVGLDIGKVWVADDGAAVAVWTTPESVEAGAVFAEIGPRMAELSGSRLAAQQQMEGLLAPHRPKEPAWFLATVGVSPDHQGKGLGSAVVLPGVEAAERAGVPAFLETSAPRNLPFYERLGFTVTADVEVPEGPRTWCMTRKPGA

SEQ ID NO: 3197 - protein, 954 aa, Artificial Sequence
  Synthetic Polypeptide
MALPVTALLLPLALLLHAARPDIVLTQTPATLSVTPGDSVSLSCRASQSISNNLHWYQQKSHESPRLLIKNASQSISGIPSKFSGSGSGTDFTLRINSVETEDFGMYFCQQSNSWPYTFGSGTKLEIKGGGGSGGGGSGGGGSQVKLQQSGPELVKPGASVKISCKASGYSFTGYYMHWVKQSHGNILDWIGYIYPYNGVSSYNQKFKGKATLTVDKSSSTAYMELRSLTSEDSAVYYCARERGLYQLRAMDYWGQGTSVTVSSTREQKLISEEDLAKPTTTPAPRPPTPAPTIASQPLSLRPEACRPAAGGAVHTRGLDFACDIYIWAPLAGTCGVLLLSLVITLYCKRGRKKLLYIFKQPFMRPVQTTQEEDGCSCRFPEEEEGGCELRVKFSRSADAPAYQQGQNQLYNELNLGRREEYDVLDKRRGRDPEMGGKPRRKNPQEGLYNELQKDKMAEAYSEIGMKGERRRGKGHDGLYQGLSTATKDTYDALHMQALPPRSRGSGATNFSLLKQAGDVEENPGPGIHMATYEVLCEVARKLGTDDREVVLFLLNVFIPQPTLAQLIGALRALKEEGRLTFPLLAECLFRAGRRDLLRDLLHLDPRFLERHLAGTMSYFSPYQLTVLHVDGELCARDIRSLIFLSKDTIGSRSTPQTFLHWVYCMENLDLLGPTDVDALMSMLRSLSRVDLQRQVQTLMGLHLSGPSHSQHYRHTPLETDFYDYKDDDDKTSGSGEGRGSLLTCGDVEENPGPHMTEYKPTVRLATRDDVPRAVRTLAAAFADYPATRHTVDPDRHIERVTELQELFLTRVGLDIGKVWVADDGAAVAVWTTPESVEAGAVFAEIGPRMAELSGSRLAAQQQMEGLLAPHRPKEPAWFLATVGVSPDHQGKGLGSAVVLPGVEAAERAGVPAFLETSAPRNLPFYERLGFTVTADVEVPEGPRTWCMTRKPGA

SEQ ID NO: 3198 - protein, 945 aa, Artificial Sequence
  Synthetic Polypeptide
MALPVTALLLPLALLLHAARPDIVMTQTPAIMSASPGQKVTITCSASSSVNYMHWYQQKLGSSPKLWIYDTSKLAPGVPARFSGSGSGTSYSLTISSMEAEDAASYFCHQWSSYPYTFGSGTKLEIKGGGGSGGGGSGGGGSEVQLQESGPDLVKPSQSLSLTCTVTGYSITSGYGWHWIRQFPGNKLEWMGYIHYSGSTTYNPSLKSRISISRDTSKNQFFLQLNSVTTEDTATYYCARSLRYWGQGTTLTVSSTREQKLISEEDLAKPTTTPAPRPPTPAPTIASQPLSLRPEACRPAAGGAVHTRGLDFACDIYIWAPLAGTCGVLLLSLVITLYCKRGRKKLLYIFKQPFMRPVQTTQEEDGCSCRFPEEEEGGCELRVKFSRSADAPAYQQGQNQLYNELNLGRREEYDVLDKRRGRDPEMGGKPRRKNPQEGLYNELQKDKMAEAYSEIGMKGERRRGKGHDGLYQGLSTATKDTYDALHMQALPPRSRGSGATNFSLLKQAGDVEENPGPGIHMATYEVLCEVARKLGTDDREVVLFLLNVFIPQPTLAQLIGALRALKEEGRLTFPLLAECLFRAGRRDLLRDLLHLDPRFLERHLAGTMSYFSPYQLTVLHVDGELCARDIRSLIFLSKDTIGSRSTPQTFLHWVYCMENLDLLGPTDVDALMSMLRSLSRVDLQRQVQTLMGLHLSGPSHSQHYRHTPLETDFYDYKDDDDKTSGSGEGRGSLLTCGDVEENPGPHMTEYKPTVRLATRDDVPRAVRTLAAAFADYPATRHTVDPDRHIERVTELQELFLTRVGLDIGKVWVADDGAAVAVWTTPESVEAGAVFAEIGPRMAELSGSRLAAQQQMEGLLAPHRPKEPAWFLATVGVSPDHQGKGLGSAVVLPGVEAAERAGVPAFLETSAPRNLPFYERLGFTVTADVEVPEGPRTWCMTRKPGA

SEQ ID NO: 3199 - protein, 948 aa, Artificial Sequence
  Synthetic Polypeptide
MALPVTALLLPLALLLHAARPDIQMTQSPSSLSASVGDRVTITCSATSSISYMHWYQQKPGKAPKGWIYDTSKLAHGVPSRFSGSGSGTDFTLTISSLQPEDFATYYCHQRRSYPFTFGQGTKVEIKGGGGSGGGGSGGGGSEVQLVQSGAEVKKPGASVKVSCKASGYTFTNFWIHWVRQAPGQGLEWIGEIDPSDSYTNYNQKFKGRVTITRDTSTSTAYLELSSLRSEDTAVYYCAREITTVDYWGQGTLVTVSSTREQKLISEEDLAKPTTTPAPRPPTPAPTIASQPLSLRPEACRPAAGGAVHTRGLDFACDIYIWAPLAGTCGVLLLSLVITLYCKRGRKKLLYIFKQPFMRPVQTTQEEDGCSCRFPEEEEGGCELRVKFSRSADAPAYQQGQNQLYNELNLGRREEYDVLDKRRGRDPEMGGKPRRKNPQEGLYNELQKDKMAEAYSEIGMKGERRRGKGHDGLYQGLSTATKDTYDALHMQALPPRSRGSGATNFSLLKQAGDVEENPGPGIHMATYEVLCEVARKLGTDDREVVLFLLNVFIPQPTLAQLIGALRALKEEGRLTFPLLAECLFRAGRRDLLRDLLHLDPRFLERHLAGTMSYFSPYQLTVLHVDGELCARDIRSLIFLSKDTIGSRSTPQTFLHWVYCMENLDLLGPTDVDALMSMLRSLSRVDLQRQVQTLMGLHLSGPSHSQHYRHTPLETDFYDYKDDDDKTSGSGEGRGSLLTCGDVEENPGPHMTEYKPTVRLATRDDVPRAVRTLAAAFADYPATRHTVDPDRHIERVTELQELFLTRVGLDIGKVWVADDGAAVAVWTTPESVEAGAVFAEIGPRMAELSGSRLAAQQQMEGLLAPHRPKEPAWFLATVGVSPDHQGKGLGSAVVLPGVEAAERAGVPAFLETSAPRNLPFYERLGFTVTADVEVPEGPRTWCMTRKPGA

SEQ ID NO: 3200 - protein, 955 aa, Artificial Sequence
  Synthetic Polypeptide
MALPVTALLLPLALLLHAARPDIQMTQSPSSLSASVGDRVTITCKASQGFNKYVAWYQQKPGKAPKLLIYYTSTLQPGVPSRFSGSGSGRDYTLTISSLQPEDFATYYCLQYGNLLYAFGQGTKVEIKRGGGGSGGGGSGGGGSEVQLVQSGAEVKKPGASVKVSCKASGYTFTSYWIGWVRQAPGQGLEWIGDIYPGGGYTNYNEKFKGRVTITRDTSTSTAYLELSSLRSEDTAVYYCARLDGSSYRGAMDSWGQGTLVTVSSTREQKLISEEDLAKPTTTPAPRPPTPAPTIASQPLSLRPEACRPAAGGAVHTRGLDFACDIYIWAPLAGTCGVLLLSLVITLYCKRGRKKLLYIFKQPFMRPVQTTQEEDGCSCRFPEEEEGGCELRVKFSRSADAPAYQQGQNQLYNELNLGRREEYDVLDKRRGRDPEMGGKPRRKNPQEGLYNELQKDKMAEAYSEIGMKGERRRGKGHDGLYQGLSTATKDTYDALHMQALPPRSRGSGATNFSLLKQAGDVEENPGPGIHMATYEVLCEVARKLGTDDREVVLFLLNVFIPQPTLAQLIGALRALKEEGRLTFPLLAECLFRAGRRDLLRDLLHLDPRFLERHLAGTMSYFSPYQLTVLHVDGELCARDIRSLIFLSKDTIGSRSTPQTFLHWVYCMENLDLLGPTDVDALMSMLRSLSRVDLQRQVQTLMGLHLSGPSHSQHYRHTPLETDFYDYKDDDDKTSGSGEGRGSLLTCGDVEENPGPHMTEYKPTVRLATRDDVPRAVRTLAAAFADYPATRHTVDPDRHIERVTELQELFLTRVGLDIGKVWVADDGAAVAVWTTPESVEAGAVFAEIGPRMAELSGSRLAAQQQMEGLLAPHRPKEPAWFLATVGVSPDHQGKGLGSAVVLPGVEAAERAGVPAFLETSAPRNLPFYERLGFTVTADVEVPEGPRTWCMTRKPGA

SEQ ID NO: 3201 - protein, 959 aa, Artificial Sequence
  Synthetic Polypeptide
MALPVTALLLPLALLLHAARPDIQLTQSPSSLSASVGDRVTITCRASQSVDYDGDSYMNWYQQKPGKAPKLLIYAASYLESGVPSRFSGSGSGTDFTLTISSLQPEDFATYYCQQSHEDPYTFGQGTKVEIKRGGGGSGGGGSGGGGSEVQLVESGGGLVQPGGSLRLSCAVSGYSITSGYSWNWIRQAPGKGLEWVASITYDGSTNYNPSVKGRITISRDDSKNTFYLQMNSLRAEDTAVYYCARGSHYFGHWHFAVWGQGTLVTVSSTREQKLISEEDLAKPTTTPAPRPPTPAPTIASQPLSLRPEACRPAAGGAVHTRGLDFACDIYIWAPLAGTCGVLLLSLVITLYCKRGRKKLLYIFKQPFMRPVQTTQEEDGCSCRFPEEEEGGCELRVKFSRSADAPAYQQGQNQLYNELNLGRREEYDVLDKRRGRDPEMGGKPRRKNPQEGLYNELQKDKMAEAYSEIGMKGERRRGKGHDGLYQGLSTATKDTYDALHMQALPPRSRGSGATNFSLLKQAGDVEENPGPGIHMATYEVLCEVARKLGTDDREVVLFLLNVFIPQPTLAQLIGALRALKEEGRLTFPLLAECLFRAGRRDLLRDLLHLDPRFLERHLAGTMSYFSPYQLTVLHVDGELCARDIRSLIFLSKDTIGSRSTPQTFLHWVYCMENLDLLGPTDVDALMSMLRSLSRVDLQRQVQTLMGLHLSGPSHSQHYRHTPLETDFYDYKDDDDKTSGSGEGRGSLLTCGDVEENPGPHMTEYKPTVRLATRDDVPRAVRTLAAAFADYPATRHTVDPDRHIERVTELQELFLTRVGLDIGKVWVADDGAAVAVWTTPESVEAGAVFAEIGPRMAELSGSRLAAQQQMEGLLAPHRPKEPAWFLATVGVSPDHQGKGLGSAVVLPGVEAAERAGVPAFLETSAPRNLPFYERLGFTVTADVEVPEGPRTWCMTRKPGA

SEQ ID NO: 3202 - protein, 951 aa, Artificial Sequence
  Synthetic Polypeptide
MALPVTALLLPLALLLHAARPDIQMTQSPSSLSASVGDRVTITCRASQDIRYYLNWYQQKPGKAPKLLIYVASSLQSGVPSRFSGSGSGTEFTLTVSSLQPEDFATYYCLQVYSTPRTFGQGTKVEIKGGGGSGGGGSGGGGSEVQLVESGGGLAKPGGSLRLSCAASGFRFTFNNYYMDWVRQAPGQGLEWVSRISSSGDPTWYADSVKGRFTISRENAKNTLFLQMNSLRAEDTAVYYCASLTTGSDSWGQGVLVTVSSTREQKLISEEDLAKPTTTPAPRPPTPAPTIASQPLSLRPEACRPAAGGAVHTRGLDFACDIYIWAPLAGTCGVLLLSLVITLYCKRGRKKLLYIFKQPFMRPVQTTQEEDGCSCRFPEEEEGGCELRVKFSRSADAPAYQQGQNQLYNELNLGRREEYDVLDKRRGRDPEMGGKPRRKNPQEGLYNELQKDKMAEAYSEIGMKGERRRGKGHDGLYQGLSTATKDTYDALHMQALPPRSRGSGATNFSLLKQAGDVEENPGPGIHMATYEVLCEVARKLGTDDREVVLFLLNVFIPQPTLAQLIGALRALKEEGRLTFPLLAECLFRAGRRDLLRDLLHLDPRFLERHLAGTMSYFSPYQLTVLHVDGELCARDIRSLIFLSKDTIGSRSTPQTFLHWVYCMENLDLLGPTDVDALMSMLRSLSRVDLQRQVQTLMGLHLSGPSHSQHYRHTPLETDFYDYKDDDDKTSGSGEGRGSLLTCGDVEENPGPHMTEYKPTVRLATRDDVPRAVRTLAAAFADYPATRHTVDPDRHIERVTELQELFLTRVGLDIGKVWVADDGAAVAVWTTPESVEAGAVFAEIGPRMAELSGSRLAAQQQMEGLLAPHRPKEPAWFLATVGVSPDHQGKGLGSAVVLPGVEAAERAGVPAFLETSAPRNLPFYERLGFTVTADVEVPEGPRTWCMTRKPGA

SEQ ID NO: 3203 - protein, 952 aa, Artificial Sequence
  Synthetic Polypeptide
MALPVTALLLPLALLLHAARPEIVMTQSPATLSVSPGERATLSCRASQSVSRNLAWYQQKPGQAPRLLIYGASTRATGIPARFSGSGSGTEFTLTIGSLQSEDFAVYYCQQYKTWPRTFGQGTNVEIKGGGGSGGGGSGGGGSQVQLQQWGAGLLKPSETLSLTCAVFGGSFSGYYWSWIRQPPGKGLEWIGEINHRGNTNDNPSLKSRVTISVDTSKNQFALKLSSVTAADTAVYYCARERGYTYGNFDHWGQGTLVTVSSTREQKLISEEDLAKPTTTPAPRPPTPAPTIASQPLSLRPEACRPAAGGAVHTRGLDFACDIYIWAPLAGTCGVLLLSLVITLYCKRGRKKLLYIFKQPFMRPVQTTQEEDGCSCRFPEEEEGGCELRVKFSRSADAPAYQQGQNQLYNELNLGRREEYDVLDKRRGRDPEMGGKPRRKNPQEGLYNELQKDKMAEAYSEIGMKGERRRGKGHDGLYQGLSTATKDTYDALHMQALPPRSRGSGATNFSLLKQAGDVEENPGPGIHMATYEVLCEVARKLGTDDREVVLFLLNVFIPQPTLAQLIGALRALKEEGRLTFPLLAECLFRAGRRDLLRDLLHLDPRFLERHLAGTMSYFSPYQLTVLHVDGELCARDIRSLIFLSKDTIGSRSTPQTFLHWVYCMENLDLLGPTDVDALMSMLRSLSRVDLQRQVQTLMGLHLSGPSHSQHYRHTPLETDFYDYKDDDDKTSGSGEGRGSLLTCGDVEENPGPHMTEYKPTVRLATRDDVPRAVRTLAAAFADYPATRHTVDPDRHIERVTELQELFLTRVGLDIGKVWVADDGAAVAVWTTPESVEAGAVFAEIGPRMAELSGSRLAAQQQMEGLLAPHRPKEPAWFLATVGVSPDHQGKGLGSAVVLPGVEAAERAGVPAFLETSAPRNLPFYERLGFTVTADVEVPEGPRTWCMTRKPGA

SEQ ID NO: 3204 - protein, 953 aa, Artificial Sequence
  Synthetic Polypeptide
MALPVTALLLPLALLLHAARPEIVMTPSSATLSVSPGERATLSCRASQSVSRNLAWYQQKPGQAPRLLIYGASTRATGIPARFSGSGSGTEFTLTISSLQSEDFAVYYCHQYSNWMCSFGQGTKLEIKGGGGSGGGGSGGGGSEVQLLESGGGLVQPGGSLRLSCAASGFTFSRYAMNWVRQAPGKGLEWVSGISGSGGRTYYADSVKGRFTISRDNSKNTLYLQMNSLRAEDTAVYYCAKDRDFWSGPFDYWGQGTLVTVSSTREQKLISEEDLAKPTTTPAPRPPTPAPTIASQPLSLRPEACRPAAGGAVHTRGLDFACDIYIWAPLAGTCGVLLLSLVITLYCKRGRKKLLYIFKQPFMRPVQTTQEEDGCSCRFPEEEEGGCELRVKFSRSADAPAYQQGQNQLYNELNLGRREEYDVLDKRRGRDPEMGGKPRRKNPQEGLYNELQKDKMAEAYSEIGMKGERRRGKGHDGLYQGLSTATKDTYDALHMQALPPRSRGSGATNFSLLKQAGDVEENPGPGIHMATYEVLCEVARKLGTDDREVVLFLLNVFIPQPTLAQLIGALRALKEEGRLTFPLLAECLFRAGRRDLLRDLLHLDPRFLERHLAGTMSYFSPYQLTVLHVDGELCARDIRSLIFLSKDTIGSRSTPQTFLHWVYCMENLDLLGPTDVDALMSMLRSLSRVDLQRQVQTLMGLHLSGPSHSQHYRHTPLETDFYDYKDDDDKTSGSGEGRGSLLTCGDVEENPGPHMTEYKPTVRLATRDDVPRAVRTLAAAFADYPATRHTVDPDRHIERVTELQELFLTRVGLDIGKVWVADDGAAVAVWTTPESVEAGAVFAEIGPRMAELSGSRLAAQQQMEGLLAPHRPKEPAWFLATVGVSPDHQGKGLGSAVVLPGVEAAERAGVPAFLETSAPRNLPFYERLGFTVTADVEVPEGPRTWCMTRKPGA

SEQ ID NO: 3205 - protein, 953 aa, Artificial Sequence; identical to SEQ ID NO: 3204
  Synthetic Polypeptide

SEQ ID NO: 3206 - protein, 955 aa, Artificial Sequence
  Synthetic Polypeptide
MALPVTALLLPLALLLHAARPQVQLQQSDAELVKPGSSVKISCKASGYTFTDHAIHWVKQKPEQGLEWIGHFSPGNTDIKYNDKFKGKATLTVDRSSSTAYMQLNSLTSEDSAVYFCKTSTFFFDYWGQGTTLTVSSGGGGSGGGGSGGGGSELVMTQSPSSLTVTAGEKVTMICKSSQSLLNSGDQKNYLTWYQQKPGQPPKLLIFWASTRESGVPDRFTGSGSGTDFTLTISSVQAEDLAVYYCQNDYSYPLTFGAGTKLELKTREQKLISEEDLAKPTTTPAPRPPTPAPTIASQPLSLRPEACRPAAGGAVHTRGLDFACDIYIWAPLAGTCGVLLLSLVITLYCKRGRKKLLYIFKQPFMRPVQTTQEEDGCSCRFPEEEEGGCELRVKFSRSADAPAYQQGQNQLYNELNLGRREEYDVLDKRRGRDPEMGGKPRRKNPQEGLYNELQKDKMAEAYSEIGMKGERRRGKGHDGLYQGLSTATKDTYDALHMQALPPRSRGSGATNFSLLKQAGDVEENPGPGIHMATYEVLCEVARKLGTDDREVVLFLLNVFIPQPTLAQLIGALRALKEEGRLTFPLLAECLFRAGRRDLLRDLLHLDPRFLERHLAGTMSYFSPYQLTVLHVDGELCARDIRSLIFLSKDTIGSRSTPQTFLHWVYCMENLDLLGPTDVDALMSMLRSLSRVDLQRQVQTLMGLHLSGPSHSQHYRHTPLETDFYDYKDDDDKTSGSGEGRGSLLTCGDVEENPGPHMTEYKPTVRLATRDDVPRAVRTLAAAFADYPATRHTVDPDRHIERVTELQELFLTRVGLDIGKVWVADDGAAVAVWTTPESVEAGAVFAEIGPRMAELSGSRLAAQQQMEGLLAPHRPKEPAWFLATVGVSPDHQGKGLGSAVVLPGVEAAERAGVPAFLETSAPRNLPFYERLGFTVTADVEVPEGPRTWCMTRKPGA

SEQ ID NO: 3207 - protein, 956 aa, Artificial Sequence
  Synthetic Polypeptide
MALPVTALLLPLALLLHAARPEVQLVESGGGLVQPGRSLRLSCAASGFTFDDYAMHWVRQAPGKGLEWVSGISWNSGSIGYADSVKGRFTISRDNAKNSLYLQMNSLRAEDTALYYCAKDKGGGYYDFWSGSDYWGQGTLVTVSSGGGGSGGGGSGGGGSSSELTQDPAVSVALGQTVRITCQGDSLRSYYASWYQQKPGQAPVLVIYGKNNRPSGIPDRFSGSSSGNTASLTITGAQAEDEADYYCNSRDSSGWVFGGGTKLTVLTREQKLISEEDLAKPTTTPAPRPPTPAPTIASQPLSLRPEACRPAAGGAVHTRGLDFACDIYIWAPLAGTCGVLLLSLVITLYCKRGRKKLLYIFKQPFMRPVQTTQEEDGCSCRFPEEEEGGCELRVKFSRSADAPAYQQGQNQLYNELNLGRREEYDVLDKRRGRDPEMGGKPRRKNPQEGLYNELQKDKMAEAYSEIGMKGERRRGKGHDGLYQGLSTATKDTYDALHMQALPPRSRGSGATNFSLLKQAGDVEENPGPGIHMATYEVLCEVARKLGTDDREVVLFLLNVFIPQPTLAQLIGALRALKEEGRLTFPLLAECLFRAGRRDLLRDLLHLDPRFLERHLAGTMSYFSPYQLTVLHVDGELCARDIRSLIFLSKDTIGSRSTPQTFLHWVYCMENLDLLGPTDVDALMSMLRSLSRVDLQRQVQTLMGLHLSGPSHSQHYRHTPLETDFYDYKDDDDKTSGSGEGRGSLLTCGDVEENPGPHMTEYKPTVRLATRDDVPRAVRTLAAAFADYPATRHTVDPDRHIERVTELQELFLTRVGLDIGKVWVADDGAAVAVWTTPESVEAGAVFAEIGPRMAELSGSRLAAQQQMEGLLAPHRPKEPAWFLATVGVSPDHQGKGLGSAVVLPGVEAAERAGVPAFLETSAPRNLPFYERLGFTVTADVEVPEGPRTWCMTRKPGA

SEQ ID NO: 3208 - protein, 965 aa, Artificial Sequence; identical to SEQ ID NO: 2938
  Synthetic Polypeptide

SEQ ID NO: 3209 - protein, 963 aa, Artificial Sequence; identical to SEQ ID NO: 2940
  Synthetic Polypeptide

SEQ ID NO: 3210 - protein, 965 aa, Artificial Sequence
  Synthetic Polypeptide
MALPVTALLLPLALLLHAARPEVQLQQSGPGLVKPSQTLSLTCAISGDSVSSNSAAWNWIRQSPSRGLEWLGRTYYRSKWYSDYAVSVKSRITINPDTSKNQFSLQLNSVTPEDTAVYYCARDPYDFWSGYPDAFDIWGQGTMVTVSSGGGGSGGGGSGGGGSQSALTQPASVSGSPGQSITISCTGTSSDVGGYNYVSWYQQHPGKAPKVIISEVNNRPSGVSHRFSGSKSGNTASLTISGLQAEDEADYFCSSYTSGRTLYVFGTGSKVTVLGTREQKLISEEDLAKPTTTPAPRPPTPAPTIASQPLSLRPEACRPAAGGAVHTRGLDFACDIYIWAPLAGTCGVLLLSLVITLYCKRGRKKLLYIFKQPFMRPVQTTQEEDGCSCRFPEEEEGGCELRVKFSRSADAPAYQQGQNQLYNELNLGRREEYDVLDKRRGRDPEMGGKPRRKNPQEGLYNELQKDKMAEAYSEIGMKGERRRGKGHDGLYQGLSTATKDTYDALHMQALPPRSRGSGATNFSLLKQAGDVEENPGPGIHMATYEVLCEVARKLGTDDREVVLFLLNVFIPQPTLAQLIGALRALKEEGRLTFPLLAECLFRAGRRDLLRDLLHLDPRFLERHLAGTMSYFSPYQLTVLHVDGELCARDIRSLIFLSKDTIGSRSTPQTFLHWVYCMENLDLLGPTDVDALMSMLRSLSRVDLQRQVQTLMGLHLSGPSHSQHYRHTPLETDFYDYKDDDDKTSGSGEGRGSLLTCGDVEENPGPHMTEYKPTVRLATRDDVPRAVRTLAAAFADYPATRHTVDPDRHIERVTELQELFLTRVGLDIGKVWVADDGAAVAVWTTPESVEAGAVFAEIGPRMAELSGSRLAAQQQMEGLLAPHRPKEPAWFLATVGVSPDHQGKGLGSAVVLPGVEAAERAGVPAFLETSAPRNLPFYERLGFTVTADVEVPEGPRTWCMTRKPGA

SEQ ID NO: 3211 - protein, 964 aa, Artificial Sequence
  Synthetic Polypeptide
MALPVTALLLPLALLLHAARPEVQLQQSGPGLVKPSQTLSLTCAISGDSMLSNSDTWNWIRQSPSRGLEWLGRTYHRSTWYDDYASSVRGRVSINVDTSKNQYSLQLNAVTPEDTGVYYCARVRLQDGNSWSDAFDVWGQGTMVTVSSGGGGSGGGGSGGGGSQSALTQPASASGSPGQSVTISCTGTSSDVGGYNYVSWYQQHPGKAPKLMIYDVSNRPSGVSNRFSGSKSGNTASLTISGLQAEDEADYYCSSYTSSSTLYVFGTGTQLTVLTREQKLISEEDLAKPTTTPAPRPPTPAPTIASQPLSLRPEACRPAAGGAVHTRGLDFACDIYIWAPLAGTCGVLLLSLVITLYCKRGRKKLLYIFKQPFMRPVQTTQEEDGCSCRFPEEEEGGCELRVKFSRSADAPAYQQGQNQLYNELNLGRREEYDVLDKRRGRDPEMGGKPRRKNPQEGLYNELQKDKMAEAYSEIGMKGERRRGKGHDGLYQGLSTATKDTYDALHMQALPPRSRGSGATNFSLLKQAGDVEENPGPGIHMATYEVLCEVARKLGTDDREVVLFLLNVFIPQPTLAQLIGALRALKEEGRLTFPLLAECLFRAGRRDLLRDLLHLDPRFLERHLAGTMSYFSPYQLTVLHVDGELCARDIRSLIFLSKDTIGSRSTPQTFLHWVYCMENLDLLGPTDVDALMSMLRSLSRVDLQRQVQTLMGLHLSGPSHSQHYRHTPLETDFYDYKDDDDKTSGSGEGRGSLLTCGDVEENPGPHMTEYKPTVRLATRDDVPRAVRTLAAAFADYPATRHTVDPDRHIERVTELQELFLTRVGLDIGKVWVADDGAAVAVWTTPESVEAGAVFAEIGPRMAELSGSRLAAQQQMEGLLAPHRPKEPAWFLATVGVSPDHQGKGLGSAVVLPGVEAAERAGVPAFLETSAPRNLPFYERLGFTVTADVEVPEGPRTWCMTRKPGA

SEQ ID NO: 3212 - protein, 724 aa, Artificial Sequence
  Synthetic Polypeptide
MALPVTALLLPLALLLHAARPDIQMTQTTSSLSASLGDRVTISCRASQDISKYLNWYQQKPDGTVKLLIYHTSRLHSGVPSRFSGSGSGTDYSLTISNLEQEDIATYFCQQGNTLPYTFGGGTKLEITGGGGSGGGGSGGGGSEVKLQESGPGLVAPSQSLSVTCTVSGVSLPDYGVSWIRQPPRKGLEWLGVIWGSETTYYNSALKSRLTIIKDNSKSQVFLKMNSLQTDDTAIYYCAKHYYYGGSYAMDYWGQGTSVTVSSRVEQKLISEEDLAKPTTTPAPRPPTPAPTIASQPLSLRPEACRPAAGGAVHTRGLDFACDIYIWAPLAGTCGVLLLSLVITLYCKRGRKKLLYIFKQPFMRPVQTTQEEDGCSCRFPEEEEGGCELRVKFSRSADAPAYQQGQNQLYNELNLGRREEYDVLDKRRGRDPEMGGKPRRKNPQEGLYNELQKDKMAEAYSEIGMKGERRRGKGHDGLYQGLSTATKDTYDALHMQALPPRSSGSGEGRGSLLTCGDVEENPGPHMTEYKPTVRLATRDDVPRAVRTLAAAFADYPATRHTVDPDRHIERVTELQELFLTRVGLDIGKVWVADDGAAVAVWTTPESVEAGAVFAEIGPRMAELSGSRLAAQQQMEGLLAPHRPKEPAWFLATVGVSPDHQGKGLGSAVVLPGVEAAERAGVPAFLETSAPRNLPFYERLGFTVTADVEVPEGPRTWCMTRKPGA

SEQ ID NO: 3213 - protein, 724 aa, Artificial Sequence
  Synthetic Polypeptide
MALPVTALLLPLALLLHAARPEIVMTQSPATLSLSPGERATLSCRASQDISKYLNWYQQKPGQAPRLLIYHTSRLHSGIPARFSGSGSGTDYTLTISSLQPEDFAVYFCQQGNTLPYTFGQGTKLEIKGGGGSGGGGSGGGGSQVQLQESGPGLVKPSETLSLTCTVSGVSLPDYGVSWIRQPPGKGLEWIGVIWGSETTYYNSSLKSRVTISKDNSKNQVSLKLSSVTAADTAVYYCAKHYYYGGSYAMDYWGQGTLVTVSSTREQKLISEEDLAKPTTTPAPRPPTPAPTIASQPLSLRPEACRPAAGGAVHTRGLDFACDIYIWAPLAGTCGVLLLSLVITLYCKRGRKKLLYIFKQPFMRPVQTTQEEDGCSCRFPEEEEGGCELRVKFSRSADAPAYQQGQNQLYNELNLGRREEYDVLDKRRGRDPEMGGKPRRKNPQEGLYNELQKDKMAEAYSEIGMKGERRRGKGHDGLYQGLSTATKDTYDALHMQALPPRSSGSGEGRGSLLTCGDVEENPGPHMTEYKPTVRLATRDDVPRAVRTLAAAFADYPATRHTVDPDRHIERVTELQELFLTRVGLDIGKVWVADDGAAVAVWTTPESVEAGAVFAEIGPRMAELSGSRLAAQQQMEGLLAPHRPKEPAWFLATVGVSPDHQGKGLGSAVVLPGVEAAERAGVPAFLETSAPRNLPFYERLGFTVTADVEVPEGPRTWCMTRKPGA

SEQ ID NO: 3214 - protein, 724 aa, Artificial Sequence
  Synthetic Polypeptide
MALPVTALLLPLALLLHAARPEIVMTQSPATLSLSPGERATLSCRASQDISKYLNWYQQKPGQAPRLLIYHTSRLHSGIPARFSGSGSGTDYTLTISSLQPEDFAVYFCQQGNTLPYTFGQGTKLEIKGGGGSGGGGSGGGGSQVQLQESGPGLVKPSETLSLTCTVSGVSLPDYGVSWIRQPPGKGLEWIGVIWGSETTYYQSSLKSRVTISKDNSKNQVSLKLSSVTAADTAVYYCAKHYYYGGSYAMDYWGQGTLVTVSSTREQKLISEEDLAKPTTTPAPRPPTPAPTIASQPLSLRPEACRPAAGGAVHTRGLDFACDIYIWAPLAGTCGVLLLSLVITLYCKRGRKKLLYIFKQPFMRPVQTTQEEDGCSCRFPEEEEGGCELRVKFSRSADAPAYQQGQNQLYNELNLGRREEYDVLDKRRGRDPEMGGKPRRKNPQEGLYNELQKDKMAEAYSEIGMKGERRRGKGHDGLYQGLSTATKDTYDALHMQALPPRSSGSGEGRGSLLTCGDVEENPGPHMTEYKPTVRLATRDDVPRAVRTLAAAFADYPATRHTVDPDRHIERVTELQELFLTRVGLDIGKVWVADDGAAVAVWTTPESVEAGAVFAEIGPRMAELSGSRLAAQQQMEGLLAPHRPKEPAWFLATVGVSPDHQGKGLGSAVVLPGVEAAERAGVPAFLETSAPRNLPFYERLGFTVTADVEVPEGPRTWCMTRKPGA

SEQ ID NO: 3215 - protein, 725 aa, Artificial Sequence
  Synthetic Polypeptide
MALPVTALLLPLALLLHAARPDEIVLTQSPATLSLSPGERATLSCSASSSVSYMHWYQQKPGQAPRLLIYDTSKLASGIPARFSGSGSGTDFTLTISSLEPEDVAVYYCFQGSVYPFTFGQGTKLEIKRGGGGSGGGGSGGGGSQVQLQESGPGLVKPSQTLSLTCTVSGGSISTSGMGVGWIRQHPGKGLEWIGHIWWDDDKRYNPALKSRVTISVDTSKNQFSLKLSSVTAADTAVYYCARMELWSYYFDYWGQGTLVTVSSTREQKLISEEDLAKPTTTPAPRPPTPAPTIASQPLSLRPEACRPAAGGAVHTRGLDFACDIYIWAPLAGTCGVLLLSLVITLYCKRGRKKLLYIFKQPFMRPVQTTQEEDGCSCRFPEEEEGGCELRVKFSRSADAPAYQQGQNQLYNELNLGRREEYDVLDKRRGRDPEMGGKPRRKNPQEGLYNELQKDKMAEAYSEIGMKGERRRGKGHDGLYQGLSTATKDTYDALHMQALPPRSSGSGEGRGSLLTCGDVEENPGPHMTEYKPTVRLATRDDVPRAVRTLAAAFADYPATRHTVDPDRHIERVTELQELFLTRVGLDIGKVWVADDGAAVAVWTTPESVEAGAVFAEIGPRMAELSGSRLAAQQQMEGLLAPHRPKEPAWFLATVGVSPDHQGKGLGSAVVLPGVEAAERAGVPAFLETSAPRNLPFYERLGFTVTADVEVPEGPRTWCMTRKPGA

SEQ ID NO: 3216 - protein, 732 aa, Artificial Sequence
  Synthetic Polypeptide
MALPVTALLLPLALLLHAARPDIQLTQSPASLAVSLGQRATISCKASQSVDYDGDSYLNWYQQIPGQPPKLLIYDASNLVSGIPPRFSGSGSGTDFTLNIHPVEKVDAATYHCQQSTEDPWTFGGGTKLEIKGGGGSGGGGSGGGGSQVQLQQSGAELVRPGSSVKISCKASGYAFSSYWMNWVKQRPGQGLEWIGQIWPGDGDTNYNGKFKGKATLTADESSSTAYMQLSSLASEDSAVYFCARRETTTVGRYYYAMDYWGQGTTVTVSSTREQKLISEEDLAKPTTTPAPRPPTPAPTIASQPLSLRPEACRPAAGGAVHTRGLDFACDIYIWAPLAGTCGVLLLSLVITLYCKRGRKKLLYIFKQPFMRPVQTTQEEDGCSCRFPEEEEGGCELRVKFSRSADAPAYQQGQNQLYNELNLGRREEYDVLDKRRGRDPEMGGKPRRKNPQEGLYNELQKDKMAEAYSEIGMKGERRRGKGHDGLYQGLSTATKDTYDALHMQALPPRSSGSGEGRGSLLTCGDVEENPGPHMTEYKPTVRLATRDDVPRAVRTLAAAFADYPATRHTVDPDRHIERVTELQELFLTRVGLDIGKVWVADDGAAVAVWTTPESVEAGAVFAEIGPRMAELSGSRLAAQQQMEGLLAPHRPKEPAWFLATVGVSPDHQGKGLGSAVVLPGVEAAERAGVPAFLETSAPRNLPFYERLGFTVTADVEVPEGPRTWCMTRKPGA

SEQ ID NO: 3217 - protein, 731 aa, Artificial Sequence
  Synthetic Polypeptide
MALPVTALLLPLALLLHAARPDIVMTQAAPSIPVTPGESVSISCRSSKSLLNSNGNTYLYWFLQRPGQSPQLLIYRMSNLASGVPDRFSGSGSGTAFTLRISRVEAEDVGVYYCMQHLEYPFTFGAGTKLELKRGGGGSGGGGSGGGGSEVQLQQSGPELIKPGASVKMSCKASGYTFTSYVMHWVKQKPGQGLEWIGYINPYNDGTKYNEKFKGKATLTSDKSSSTAYMELSSLTSEDSAVYYCARGTYYYGSRVFDYWGQGTTLTVSSTREQKLISEEDLAKPTTTPAPRPPTPAPTIASQPLSLRPEACRPAAGGAVHTRGLDFACDIYIWAPLAGTCGVLLLSLVITLYCKRGRKKLLYIFKQPFMRPVQTTQEEDGCSCRFPEEEEGGCELRVKFSRSADAPAYQQGQNQLYNELNLGRREEYDVLDKRRGRDPEMGGKPRRKNPQEGLYNELQKDKMAEAYSEIGMKGERRRGKGHDGLYQGLSTATKDTYDALHMQALPPRSSGSGEGRGSLLTCGDVEENPGPHMTEYKPTVRLATRDDVPRAVRTLAAAFADYPATRHTVDPDRHIERVTELQELFLTRVGLDIGKVWVADDGAAVAVWTTPESVEAGAVFAEIGPRMAELSGSRLAAQQQMEGLLAPHRPKEPAWFLATVGVSPDHQGKGLGSAVVLPGVEAAERAGVPAFLETSAPRNLPFYERLGFTVTADVEVPEGPRTWCMTRKPGA

SEQ ID NO: 3218 - protein, 729 aa, Artificial Sequence
  Synthetic Polypeptide
MALPVTALLLPLALLLHAARPEIVLTQSPDFQSVTPKEKVTITCRASESVDTFGISFMNWFQQKPDQSPKLLIHAASNQGSGVPSRFSGSGSGTDFTLTINSLEAEDAATYYCQQSKEVPFTFGGGTKVEIKGGGGSGGGGSGGGGSEVQLVESGGGLVQPGGSLRLSCAASGFTFSSSWMNWVRQAPGKGLEWVGRIYPGDGDTNYNGKFKGRFTISRDDSKNSLYLQMNSLKTEDTAVYYCARSGFITTVLDFDYWGQGTLVTVSSTREQKLISEEDLAKPTTTPAPRPPTPAPTIASQPLSLRPEACRPAAGGAVHTRGLDFACDIYIWAPLAGTCGVLLLSLVITLYCKRGRKKLLYIFKQPFMRPVQTTQEEDGCSCRFPEEEEGGCELRVKFSRSADAPAYQQGQNQLYNELNLGRREEYDVLDKRRGRDPEMGGKPRRKNPQEGLYNELQKDKMAEAYSEIGMKGERRRGKGHDGLYQGLSTATKDTYDALHMQALPPRSSGSGEGRGSLLTCGDVEENPGPHMTEYKPTVRLATRDDVPRAVRTLAAAFADYPATRHTVDPDRHIERVTELQELFLTRVGLDIGKVWVADDGAAVAVWTTPESVEAGAVFAEIGPRMAELSGSRLAAQQQMEGLLAPHRPKEPAWFLATVGVSPDHQGKGLGSAVVLPGVEAAERAGVPAFLETSAPRNLPFYERLGFTVTADVEVPEGPRTWCMTRKPGA

SEQ ID NO: 3219 - protein, 725 aa, Artificial Sequence
  Synthetic Polypeptide
MALPVTALLLPLALLLHAARPAIQLTQSPSSLSASVGDRVTITCRASQGISSAQQKPGKAPKLLILAWYSSLESGVPSRFSGYDASGSGTDFTLTISSLQPEDFATYYCQQFNSYPYTFGQGTKLEIKGGGGSGGGGSGGGGSEVQLVQSGAEVKKPGESLKISCKGSGYSFSSSWIGWVRQMPGKGLEWMGIIYPDDSDTRYSPSFQGQVTISADKSIRTAYLQWSSLKASDTAMYYCARHVTMIWGVIIDFWGQGTLVTVSSTREQKLISEEDLAKPTTTPAPRPPTPAPTIASQPLSLRPEACRPAAGGAVHTRGLDFACDIYIWAPLAGTCGVLLLSLVITLYCKRGRKKLLYIFKQPFMRPVQTTQEEDGCSCRFPEEEEGGCELRVKFSRSADAPAYQQGQNQLYNELNLGRREEYDVLDKRRGRDPEMGGKPRRKNPQEGLYNELQKDKMAEAYSEIGMKGERRRGKGHDGLYQGLSTATKDTYDALHMQALPPRSSGSGEGRGSLLTCGDVEENPGPHMTEYKPTVRLATRDDVPRAVRTLAAAFADYPATRHTVDPDRHIERVTELQELFLTRVGLDIGKVWVADDGAAVAVWTTPESVEAGAVFAEIGPRMAELSGSRLAAQQQMEGLLAPHRPKEPAWFLATVGVSPDHQGKGLGSAVVLPGVEAAERAGVPAFLETSAPRNLPFYERLGFTVTADVEVPEGPRTWCMTRKPGA

SEQ ID NO: 3220 - protein, 749 aa, Artificial Sequence
  Synthetic Polypeptide
MALPVTALLLPLALLLHAARPINIYNAEPANPSEKNSPEFDIVMTQSPATLSLSPGERATLSCRSSKSLQNVNGNTYLYWFQQKPGQSPQLLIYRMSNLNSGVPDRFSGSGSGTEFTLTISSLEPEDFAVYYCMQHLEYPITFGAGTKLEIKGGGGSGGGGSGGGGSEVQLVESGGGLVKPGGSLKLSCAASGYTFTSYVMHWVRQAPGKGLEWIGYINPYNDGTKYNEKFQGRVTISSDKSISTAYMELSSLRSEDTAMYYCARGTYYYGTRVFDYWGQGTLVTVSSTREQKLISEEDLAKPTTTPAPRPPTPAPTIASQPLSLRPEACRPAAGGAVHTRGLDFACDIYIWAPLAGTCGVLLLSLVITLYCKRGRKKLLYIFKQPFMRPVQTTQEEDGCSCRFPEEEEGGCELRVKFSRSADAPAYQQGQNQLYNELNLGRREEYDVLDKRRGRDPEMGGKPRRKNPQEGLYNELQKDKMAEAYSEIGMKGERRRGKGHDGLYQGLSTATKDTYDALHMQALPPRSSGSGEGRGSLLTCGDVEENPGPHMTEYKPTVRLATRDDVPRAVRTLAAAFADYPATRHTVDPDRHIERVTELQELFLTRVGLDIGKVWVADDGAAVAVWTTPESVEAGAVFAEIGPRMAELSGSRLAAQQQMEGLLAPHRPKEPAWFLATVGVSPDHQGKGLGSAVVLPGVEAAERAGVPAFLETSAPRNLPFYERLGFTVTADVEVPEGPRTWCMTRKPGA

SEQ ID NO: 3221 - protein, 731 aa, Artificial Sequence
  Synthetic Polypeptide
MALPVTALLLPLALLLHAARPDILLTQSPATLSLSPGERATLSCRASQSVDYDGDSYLNWYQQKPGQPPKLLIYDASNLVSGIPPRFSGSGSGTDFTLTISRLEPEDFAVYHCQQSTEDPWTFGGGTKLEIKGGGGSGGGGSGGGGSQVQLVESGGGLVEPGGSLRLSCMSGYAFSSYWMNWVRQMPGKGLEWMGQIWPGDGDTNYNPSLKSRVTITADESTSTAYMELSSLKAEDTAVYFCARRETTTVGRYYYAMDYWGQGTLVTVSSTREQKLISEEDLAKPTTTPAPRPPTPAPTIASQPLSLRPEACRPAAGGAVHTRGLDFACDIYIWAPLAGTCGVLLLSLVITLYCKRGRKKLLYIFKQPFMRPVQTTQEEDGCSCRFPEEEEGGCELRVKFSRSADAPAYQQGQNQLYNELNLGRREEYDVLDKRRGRDPEMGGKPRRKNPQEGLYNELQKDKMAEAYSEIGMKGERRRGKGHDGLYQGLSTATKDTYDALHMQALPPRSSGSGEGRGSLLTCGDVEENPGPHMTEYKPTVRLATRDDVPRAVRTLAAAFADYPATRHTVDPDRHIERVTELQELFLTRVGLDIGKVWVADDGAAVAVWTTPESVEAGAVFAEIGPRMAELSGSRLAAQQQMEGLLAPHRPKEPAWFLATVGVSPDHQGKGLGSAVVLPGVEAAERAGVPAFLETSAPRNLPFYERLGFTVTADVEVPEGPRTWCMTRKPGA

SEQ ID NO: 3222 - protein, 728 aa, Artificial Sequence
  Synthetic Polypeptide
MALPVTALLLPLALLLHAARPDILLTQSPATLSLSPGERATLSCRASQSVDNYGISFMNWYQQKPGQPPKLLIYAASNQGSGIPSRFSGSGSGTDFTLTISSLEPEDFAMYFCQQSNEVPRTFGGGTKLEIKGGGGSGGGGSGGGGSQVQLVESGGGLVEPGGSLRLSCMSGYAFSSSWMNWVRQMPGKGLEWMGRIYPGDGDTNYNGKFKERVTITADESTSTAYMELSSLKAEDTAVYFCARSEYWGNYWAMDYWGQGTLVTVSSTREQKLISEEDLAKPTTTPAPRPPTPAPTIASQPLSLRPEACRPAAGGAVHTRGLDFACDIYIWAPLAGTCGVLLLSLVITLYCKRGRKKLLYIFKQPFMRPVQTTQEEDGCSCRFPEEEEGGCELRVKFSRSADAPAYQQGQNQLYNELNLGRREEYDVLDKRRGRDPEMGGKPRRKNPQEGLYNELQKDKMAEAYSEIGMKGERRRGKGHDGLYQGLSTATKDTYDALHMQALPPRSSGSGEGRGSLLTCGDVEENPGPHMTEYKPTVRLATRDDVPRAVRTLAAAFADYPATRHTVDPDRHIERVTELQELFLTRVGLDIGKVWVADDGAAVAVWTTPESVEAGAVFAEIGPRMAELSGSRLAAQQQMEGLLAPHRPKEPAWFLATVGVSPDHQGKGLGSAVVLPGVEAAERAGVPAFLETSAPRNLPFYERLGFTVTADVEVPEGPRTWCMTRKPGA

SEQ ID NO: 3223 - protein, 727 aa, Artificial Sequence
  Synthetic Polypeptide
MALPVTALLLPLALLLHAARPDILLTQSPATLSLSPGERATLSCKASQNVGTNVAWYQQKPGQPPKLLIYSATYRNSGIPARFSGSGSGTEFTLTITNVQSKDLADYFYFCQYNRYPYTSGGGTKLEIKRGGGGSGGGGSGGGGSQVQLVESGGGLVEPGGSLRLSCMSGYAFSSYWMNWVRQMPGKGLEWMGQIYPGDGDTNYNGKFKGRVTITADESTSTAYMELSSLKAEDTAVYFCARKTISSVVDFYFDNWGQGTLVTVSSTREQKLISEEDLAKPTTTPAPRPPTPAPTIASQPLSLRPEACRPAAGGAVHTRGLDFACDIYIWAPLAGTCGVLLLSLVITLYCKRGRKKLLYIFKQPFMRPVQTTQEEDGCSCRFPEEEEGGCELRVKFSRSADAPAYQQGQNQLYNELNLGRREEYDVLDKRRGRDPEMGGKPRRKNPQEGLYNELQKDKMAEAYSEIGMKGERRRGKGHDGLYQGLSTATKDTYDALHMQALPPRSSGSGEGRGSLLTCGDVEENPGPHMTEYKPTVRLATRDDVPRAVRTLAAAFADYPATRHTVDPDRHIERVTELQELFLTRVGLDIGKVWVADDGAAVAVWTTPESVEAGAVFAEIGPRMAELSGSRLAAQQQMEGLLAPHRPKEPAWFLATVGVSPDHQGKGLGSAVVLPGVEAAERAGVPAFLETSAPRNLPFYERLGFTVTADVEVPEGPRTWCMTRKPGA

SEQ ID NO: 3224 - protein, 740 aa, Artificial Sequence
  Synthetic Polypeptide
MALPVTALLLPLALLLHAARPINIYNAEPANPSEKNSPEFQIVLTQSPATLSASPGEKATMTCSASSGVNYMHWYQQKPGTSPKRWIYDTDKTASGVPARFSGSGSGTSYSLTISSMEAEDAATYYCHQRGSYTFGGGTKLEIKGGGGSGGGGSGGGGSQVQLEQPGAEVVKPGASVKVSCKTSGYTFTSNWMHWVKQTPGKGLEWIGEIDPSDSYTNYNQKFDGKAKLTVDKSSSTAYMEVSDLTAEDSATYYCARGSNPYYYAMDYWGQGTSVTVSSTREQKLISEEDLAKPTTTPAPRPPTPAPTIASQPLSLRPEACRPAAGGAVHTRGLDFACDIYIWAPLAGTCGVLLLSLVITLYCKRGRKKLLYIFKQPFMRPVQTTQEEDGCSCRFPEEEEGGCELRVKFSRSADAPAYQQGQNQLYNELNLGRREEYDVLDKRRGRDPEMGGKPRRKNPQEGLYNELQKDKMAEAYSEIGMKGERRRGKGHDGLYQGLSTATKDTYDALHMQALPPRSSGSGEGRGSLLTCGDVEENPGPHMTEYKPTVRLATRDDVPRAVRTLAAAFADYPATRHTVDPDRHIERVTELQELFLTRVGLDIGKVWVADDGAAVAVWTTPESVEAGAVFAEIGPRMAELSGSRLAAQQQMEGLLAPHRPKEPAWFLATVGVSPDHQGKGLGSAVVLPGVEAAERAGVPAFLETSAPRNLPFYERLGFTVTADVEVPEGPRTWCMTRKPGA

SEQ ID NO: 3225 - protein, 726 aa, Artificial Sequence
  Synthetic Polypeptide
MALPVTALLLPLALLLHAARPDIQMTQSPSSLSASVGDRVTITCKASDHINNWLAWYQQKPGQAPKLLIYGATTLETGVPSRFSGSGSGTDYTLTISSLQPEDFATYYCQQSWNTPWTFGQGTKLEIKRGGGGSGGGGSGGGGSQVQLQQPGAELVKPGASVKMSCKASGYAFSSYWINWMKQKPGQGLEWIGQIYPGDGDTNYNGKFKGRATLTADTSSSTAYMQLSSLTSEDSAVYFCARSITTVVGCAMDYWGQGTSVTVSSTREQKLISEEDLAKPTTTPAPRPPTPAPTIASQPLSLRPEACRPAAGGAVHTRGLDFACDIYIWAPLAGTCGVLLLSLVITLYCKRGRKKLLYIFKQPFMRPVQTTQEEDGCSCRFPEEEEGGCELRVKFSRSADAPAYQQGQNQLYNELNLGRREEYDVLDKRRGRDPEMGGKPRRKNPQEGLYNELQKDKMAEAYSEIGMKGERRRGKGHDGLYQGLSTATKDTYDALHMQALPPRSSGSGEGRGSLLTCGDVEENPGPHMTEYKPTVRLATRDDVPRAVRTLAAAFADYPATRHTVDPDRHIERVTELQELFLTRVGLDIGKVWVADDGAAVAVWTTPESVEAGAVFAEIGPRMAELSGSRLAAQQQMEGLLAPHRPKEPAWFLATVGVSPDHQGKGLGSAVVLPGVEAAERAGVPAFLETSAPRNLPFYERLGFTVTADVEVPEGPRTWCMTRKPGA

SEQ ID NO: 3226 - protein, 734 aa, Artificial Sequence
  Synthetic Polypeptide
MALPVTALLLPLALLLHAARPDDIQLTQSPSSLSASVGDRVTITCKASQSVDYDGDSYLNWYQQIPGKAPKLLIYDASNLVSGIPPRFSGSGSGTDYTFTISSLQPEDIATYHCQQSTEDPWTFGGGTKLQIKRGGGGSGGGGSGGGGSQVQLQQSGAEVKKPGSSVKVSCKASGYAFSSYWMNWVRQRPGQGLEWIGQIWPGDGDTNYNGKFKGRATITADESTNTAYMELSSLRSEDTAFYSCARRETTTVGRYYYAMDYWGQGTTVTVSSTREQKLISEEDLAKPTTTPAPRPPTPAPTIASQPLSLRPEACRPAAGGAVHTRGLDFACDIYIWAPLAGTCGVLLLSLVITLYCKRGRKKLLYIFKQPFMRPVQTTQEEDGCSCRFPEEEEGGCELRVKFSRSADAPAYQQGQNQLYNELNLGRREEYDVLDKRRGRDPEMGGKPRRKNPQEGLYNELQKDKMAEAYSEIGMKGERRRGKGHDGLYQGLSTATKDTYDALHMQALPPRSSGSGEGRGSLLTCGDVEENPGPHMTEYKPTVRLATRDDVPRAVRTLAAAFADYPATRHTVDPDRHIERVTELQELFLTRVGLDIGKVWVADDGAAVAVWTTPESVEAGAVFAEIGPRMAELSGSRLAAQQQMEGLLAPHRPKEPAWFLATVGVSPDHQGKGLGSAVVLPGVEAAERAGVPAFLETSAPRNLPFYERLGFTVTADVEVPEGPRTWCMTRKPGA

SEQ ID NO: 3227 - protein, 725 aa, Artificial Sequence
  Synthetic Polypeptide
MALPVTALLLPLALLLHAARPQSVLTQPASVSGSPGQSITISCTGTSSDVGGYNYVSWYQQHPGKAPKLMIYDVNNRPSEVSNRFSGSKSGNTASLTISGLQAEDEADYYCSSYTTGSRAVFGGGTKLTVLGGGGGSGGGGSGGGGSEVQLVQSGAEVKKPGESLTISCKASGYSFPNYWITWVRQMSGGGLEWMGRIDPGDSYTTYNPSFQGHVTISIDKSTNTAYLHWNSLKASDTAMYYCARYYVSLVDIWGQGTLVTVSSTREQKLISEEDLAKPTTTPAPRPPTPAPTIASQPLSLRPEACRPAAGGAVHTRGLDFACDIYIWAPLAGTCGVLLLSLVITLYCKRGRKKLLYIFKQPFMRPVQTTQEEDGCSCRFPEEEEGGCELRVKFSRSADAPAYQQGQNQLYNELNLGRREEYDVLDKRRGRDPEMGGKPRRKNPQEGLYNELQKDKMAEAYSEIGMKGERRRGKGHDGLYQGLSTATKDTYDALHMQALPPRSSGSGEGRGSLLTCGDVEENPGPHMTEYKPTVRLATRDDVPRAVRTLAAAFADYPATRHTVDPDRHIERVTELQELFLTRVGLDIGKVWVADDGAAVAVWTTPESVEAGAVFAEIGPRMAELSGSRLAAQQQMEGLLAPHRPKEPAWFLATVGVSPDHQGKGLGSAVVLPGVEAAERAGVPAFLETSAPRNLPFYERLGFTVTADVEVPEGPRTWCMTRKPGA

SEQ ID NO: 3228 - protein, 731 aa, Artificial Sequence
  Synthetic Polypeptide
MALPVTALLLPLALLLHAARPQSVVTQPPSVSAAPGQKVTISCSGSSSNIGNNYVSWYQQLPGTAPKLLIYDNNKRPSGIPDRFSGSKSGTSATLGITGLQTGDEADYYCGTWDGSLYTMLFGGGTKLTVLGGGGSGGGGSGGGGSEVQLVESGGGLVKPGGSLRLSCAASGFTFSNAWMSWVRQAPGKGLEWVGFIRSKAYGGTTEYAASVKGRFTISRDDSKSIAYLQMNNLKTEDTAVYYCARDGLYSSSWYDSDYWGQGTLVTVSSTREQKLISEEDLAKPTTTPAPRPPTPAPTIASQPLSLRPEACRPAAGGAVHTRGLDFACDIYIWAPLAGTCGVLLLSLVITLYCKRGRKKLLYIFKQPFMRPVQTTQEEDGCSCRFPEEEEGGCELRVKFSRSADAPAYQQGQNQLYNELNLGRREEYDVLDKRRGRDPEMGGKPRRKNPQEGLYNELQKDKMAEAYSEIGMKGERRRGKGHDGLYQGLSTATKDTYDALHMQALPPRSSGSGEGRGSLLTCGDVEENPGPHMTEYKPTVRLATRDDVPRAVRTLAAAFADYPATRHTVDPDRHIERVTELQELFLTRVGLDIGKVWVADDGAAVAVWTTPESVEAGAVFAEIGPRMAELSGSRLAAQQQMEGLLAPHRPKEPAWFLATVGVSPDHQGKGLGSAVVLPGVEAAERAGVPAFLETSAPRNLPFYERLGFTVTADVEVPEGPRTWCMTRKPGA

SEQ ID NO: 3229 - protein, 736 aa, Artificial Sequence
  Synthetic Polypeptide
MALPVTALLLPLALLLHAARPQSVLTQPPSVSGAPGQRVTISCTGSSSNIGAGYDVHWYQQLPGTAPKLLIFGNSNRPSGVPDRFSGFKSGTSASLAITGLQAEDEADYFCQSYDSSLSGSGVFGTGTKVTVLGGGGGSGGGGSGGGGSQMQLVQSGGGLVQPGRSLRLSCAASGFTFDDYAMHWVRQAPGKGLEWVSGISWNSGSIGYADSVKGRFTISRDNAKNSLYLQMNSLRAEDTALYYCAKDIHSGSYYGLLYYAMDVWGQGTTVTVSSTREQKLISEEDLAKPTTTPAPRPPTPAPTIASQPLSLRPEACRPAAGGAVHTRGLDFACDIYIWAPLAGTCGVLLLSLVITLYCKRGRKKLLYIFKQPFMRPVQTTQEEDGCSCRFPEEEEGGCELRVKFSRSADAPAYQQGQNQLYNELNLGRREEYDVLDKRRGRDPEMGGKPRRKNPQEGLYNELQKDKMAEAYSEIGMKGERRRGKGHDGLYQGLSTATKDTYDALHMQALPPRSSGSGEGRGSLLTCGDVEENPGPHMTEYKPTVRLATRDDVPRAVRTLAAAFADYPATRHTVDPDRHIERVTELQELFLTRVGLDIGKVWVADDGAAVAVWTTPESVEAGAVFAEIGPRMAELSGSRLAAQQQMEGLLAPHRPKEPAWFLATVGVSPDHQGKGLGSAVVLPGVEAAERAGVPAFLETSAPRNLPFYERLGFTVTADVEVPEGPRTWCMTRKPGA

SEQ ID NO: 3230 - protein, 723 aa, Artificial Sequence
  Synthetic Polypeptide
MALPVTALLLPLALLLHAARPDYIHVTQSPSSLSVSIGDRVTINCQTSQGVGSDLHWYQHKPGRAPKLLIHHASSVEDGVPSRFSGTGFHTSFNLTINDLQADDIGTYYCQVLQSFGRGSRLDTKGGGGSGGGGSGGGGSRAHLVQSGTAMKKPGASVRVSCQTSGYTFTAHILFWFRQAPGRGLEWVGWIKPQYGAVNFGGGFRDRVTLTRDVYREIAYMDIRGLKPDDTAVYYCARDRSYGDSSWALDAWGQGTTVVVSATREQKLISEEDLAKPTTTPAPRPPTPAPTIASQPLSLRPEACRPAAGGAVHTRGLDFACDIYIWAPLAGTCGVLLLSLVITLYCKRGRKKLLYIFKQPFMRPVQTTQEEDGCSCRFPEEEEGGCELRVKFSRSADAPAYQQGQNQLYNELNLGRREEYDVLDKRRGRDPEMGGKPRRKNPQEGLYNELQKDKMAEAYSEIGMKGERRRGKGHDGLYQGLSTATKDTYDALHMQALPPRSSGSGEGRGSLLTCGDVEENPGPHMTEYKPTVRLATRDDVPRAVRTLAAAFADYPATRHTVDPDRHIERVTELQELFLTRVGLDIGKVWVADDGAAVAVWTTPESVEAGAVFAEIGPRMAELSGSRLAAQQQMEGLLAPHRPKEPAWFLATVGVSPDHQGKGLGSAVVLPGVEAAERAGVPAFLETSAPRNLPFYERLGFTVTADVEVPEGPRTWCMTRKPGA

SEQ ID NO: 3231 - protein, 733 aa, Artificial Sequence
  Synthetic Polypeptide
MALPVTALLLPLALLLHAARPDVQMIQTPDSLAVSLGQRATISCRASESVDNYGISFMHWYQQKPGQSPKLLIYRASNLESGIPARFSGSGSRTDFTLTINPVETDDVATYYCQQNNKDPPTFGGGTKLEIKGGGGSGGGGSGGGGSGGGGSQVQLQQSGAELVKPGASVKISCKASGYAFSSYWMNWVKQRPGKGLEWIGQIYPGDGDTTYNGKFKGKATLTADKSSSTVYMQLNSLTSEDSAVYFCVRYYYGSSGYFDYWGQGTTLTVSSTREQKLISEEDLAKPTTTPAPRPPTPAPTIASQPLSLRPEACRPAAGGAVHTRGLDFACDIYIWAPLAGTCGVLLLSLVITLYCKRGRKKLLYIFKQPFMRPVQTTQEEDGCSCRFPEEEEGGCELRVKFSRSADAPAYQQGQNQLYNELNLGRREEYDVLDKRRGRDPEMGGKPRRKNPQEGLYNELQKDKMAEAYSEIGMKGERRRGKGHDGLYQGLSTATKDTYDALHMQALPPRSSGSGEGRGSLLTCGDVEENPGPHMTEYKPTVRLATRDDVPRAVRTLAAAFADYPATRHTVDPDRHIERVTELQELFLTRVGLDIGKVWVADDGAAVAVWTTPESVEAGAVFAEIGPRMAELSGSRLAAQQQMEGLLAPHRPKEPAWFLATVGVSPDHQGKGLGSAVVLPGVEAAERAGVPAFLETSAPRNLPFYERLGFTVTADVEVPEGPRTWCMTRKPGA

SEQ ID NO: 3232 - protein, 724 aa, Artificial Sequence
  Synthetic Polypeptide
MALPVTALLLPLALLLHAARPDVQMIQTPSSLSASLGDRVTISCRASQDIGNYLNWYQQKPDGTVKLLIYYTSRLHSGVPSRFSGSGSGTEYSLTISNLEQEDIATYFCQQGSALPPTFGGGTKLEINGGGGSGGGGSGGGGSALQLQQSGAELVRPGASVTLSCKASGYTFTDYEMHWVKQTPVHGLEWIGAIDPETGGTAYNQKFEGKAILTADKSSSTAYMELRSLTSEDSPVYYCARRRYYGSSSFDYWGQGTTLTVSSTREQKLISEEDLAKPTTTPAPRPPTPAPTIASQPLSLRPEACRPAAGGAVHTRGLDFACDIYIWAPLAGTCGVLLLSLVITLYCKRGRKKLLYIFKQPFMRPVQTTQEEDGCSCRFPEEEEGGCELRVKFSRSADAPAYQQGQNQLYNELNLGRREEYDVLDKRRGRDPEMGGKPRRKNPQEGLYNELQKDKMAEAYSEIGMKGERRRGKGHDGLYQGLSTATKDTYDALHMQALPPRSSGSGEGRGSLLTCGDVEENPGPHMTEYKPTVRLATRDDVPRAVRTLAAAFADYPATRHTVDPDRHIERVTELQELFLTRVGLDIGKVWVADDGAAVAVWTTPESVEAGAVFAEIGPRMAELSGSRLAAQQQMEGLLAPHRPKEPAWFLATVGVSPDHQGKGLGSAVVLPGVEAAERAGVPAFLETSAPRNLPFYERLGFTVTADVEVPEGPRTWCMTRKPGA

SEQ ID NO: 3233 - protein, 731 aa, Artificial Sequence
  Synthetic Polypeptide
MRLPAQLLGLLMLWVSGSSGDVVMTQSPLSLPVTPGAPASISCRSSQSIVHSNGNTYLEWYLQKPGQSPKLLIYKVSNRFSGVPDRFSGSGSGTDFTLRISRVEAEDVGIYYCFQGSHVPPTFGPGTKLEIKGGGGSGGGGSGGGGSEVQLVESGGGLVQPGGSLRLSCSASGFTFSSFGMHWVRQAPGKGLEWVAYISSGSSTIYYGDTVKGRFTISRDNAKNSLFLQMSSLRAEDTAVYYCAREGGYYYGRSYYTMDYWGQGTTVTVSTREQKLISEEDLAKPTTTPAPRPPTPAPTIASQPLSLRPEACRPAAGGAVHTRGLDFACDIYIWAPLAGTCGVLLLSLVITLYCKRGRKKLLYIFKQPFMRPVQTTQEEDGCSCRFPEEEEGGCELRVKFSRSADAPAYQQGQNQLYNELNLGRREEYDVLDKRRGRDPEMGGKPRRKNPQEGLYNELQKDKMAEAYSEIGMKGERRRGKGHDGLYQGLSTATKDTYDALHMQALPPRSSGSGEGRGSLLTCGDVEENPGPHMTEYKPTVRLATRDDVPRAVRTLAAAFADYPATRHTVDPDRHIERVTELQELFLTRVGLDIGKVWVADDGAAVAVWTTPESVEAGAVFAEIGPRMAELSGSRLAAQQQMEGLLAPHRPKEPAWFLATVGVSPDHQGKGLGSAVVLPGVEAAERAGVPAFLETSAPRNLPFYERLGFTVTADVEVPEGPRTWCMTRKPGA

SEQ ID NO: 3234 - protein, 756 aa, Artificial Sequence
  Synthetic Polypeptide
MALPVTALLLPLALLLHAARPARKRTQPTFGFTVNWKFSESTTVFTGQCFIDRNGKEVLKTMWLLRSSVNDIGDDWKATRVGINIFTRLRTQKEGGSGGSARKCSLTGKWTNDLGSNMTIGAVNSRGEFTGTYITAVTATSNEIKESPLHGTQNTINKSGGSTTVFTGQCFIDRNGKEVLKTMWLLRSSVNDIGDDWKATRVGINIFTRLRTQKEGGSGGSARKCSLTGKWTNDLGSNMTIGAVNSRGEFTGTYITAVTATSNEIKESPLHGTQNTINKRTQPTFGFTVNWKFSETREQKLISEEDLAKPTTTPAPRPPTPAPTIASQPLSLRPEACRPAAGGAVHTRGLDFACDIYIWAPLAGTCGVLLLSLVITLYCKRGRKKLLYIFKQPFMRPVQTTQEEDGCSCRFPEEEEGGCELRVKFSRSADAPAYQQGQNQLYNELNLGRREEYDVLDKRRGRDPEMGGKPRRKNPQEGLYNELQKDKMAEAYSEIGMKGERRRGKGHDGLYQGLSTATKDTYDALHMQALPPRSSGSGEGRGSLLTCGDVEENPGPHMTEYKPTVRLATRDDVPRAVRTLAAAFADYPATRHTVDPDRHIERVTELQELFLTRVGLDIGKVWVADDGAAVAVWTTPESVEAGAVFAEIGPRMAELSGSRLAAQQQMEGLLAPHRPKEPAWFLATVGVSPDHQGKGLGSAVVLPGVEAAERAGVPAFLETSAPRNLPFYERLGFTVTADVEVPEGPRTWCMTRKPGA

SEQ ID NO: 3235 - protein, 728 aa, Artificial Sequence
  Synthetic Polypeptide
MALPVTALLLPLALLLHAARPDIVLTQSPASLAVSLGQRATISCRASKSVSTSGYSYLHWYQQKPGQPPKLLIYLASNLESGVPARFSGSGSGTDFTLNIHPVEEEDAATYYCQHSRELPFTFGSGTKLEIKGGGGSGGGGSGGGGSQVQLVESGGGLVQPGGSLKLSCAASGFDFSRYWMSWVRQAPGKGLEWIGEINPTSSTINFTPSLKDKVFISRDNAKNTLYLQMSKVRSEDTALYYCARGNYYRYGDAMDYWGQGTSVTVSTREQKLISEEDLAKPTTTPAPRPPTPAPTIASQPLSLRPEACRPAAGGAVHTRGLDFACDIYIWAPLAGTCGVLLLSLVITLYCKRGRKKLLYIFKQPFMRPVQTTQEEDGCSCRFPEEEEGGCELRVKFSRSADAPAYQQGQNQLYNELNLGRREEYDVLDKRRGRDPEMGGKPRRKNPQEGLYNELQKDKMAEAYSEIGMKGERRRGKGHDGLYQGLSTATKDTYDALHMQALPPRSSGSGEGRGSLLTCGDVEENPGPHMTEYKPTVRLATRDDVPRAVRTLAAAFADYPATRHTVDPDRHIERVTELQELFLTRVGLDIGKVWVADDGAAVAVWTTPESVEAGAVFAEIGPRMAELSGSRLAAQQQMEGLLAPHRPKEPAWFLATVGVSPDHQGKGLGSAVVLPGVEAAERAGVPAFLETSAPRNLPFYERLGFTVTADVEVPEGPRTWCMTRKPGA

SEQ ID NO: 3236 - protein, 726 aa, Artificial Sequence
  Synthetic Polypeptide
MALPVTALLLPLALLLHAARPDIQMTQSPSSLSASVGDRVTITCSASQDISNYLNWYQQKPGKAPKLLIYYTSNLHSGVPSRFSGSGSGTDFTLTISSLQPEDFATYYCQQYRKLPWTFGQGTKLEIKRGGGGSGGGGSGGGGSQVQLVQSGAEVKKPGSSVKVSCKASGGTFSNYWMHWVRQAPGQGLEWMGATYRGHSDTYYNQKFKGRVTITADKSTSTAYMELSSLRSEDTAVYYCARGAIYDGYDVLDNWGQGTLVTVSSTREQKLISEEDLAKPTTTPAPRPPTPAPTIASQPLSLRPEACRPAAGGAVHTRGLDFACDIYIWAPLAGTCGVLLLSLVITLYCKRGRKKLLYIFKQPFMRPVQTTQEEDGCSCRFPEEEEGGCELRVKFSRSADAPAYQQGQNQLYNELNLGRREEYDVLDKRRGRDPEMGGKPRRKNPQEGLYNELQKDKMAEAYSEIGMKGERRRGKGHDGLYQGLSTATKDTYDALHMQALPPRSSGSGEGRGSLLTCGDVEENPGPHMTEYKPTVRLATRDDVPRAVRTLAAAFADYPATRHTVDPDRHIERVTELQELFLTRVGLDIGKVWVADDGAAVAVWTTPESVEAGAVFAEIGPRMAELSGSRLAAQQQMEGLLAPHRPKEPAWFLATVGVSPDHQGKGLGSAVVLPGVEAAERAGVPAFLETSAPRNLPFYERLGFTVTADVEVPEGPRTWCMTRKPGA

SEQ ID NO: 3237 - protein, 726 aa, Artificial Sequence
  Synthetic Polypeptide
MALPVTALLLPLALLLHAARPDIVLTQSPATLSLSPGDRATISCRASESVTILGSHLIYWYQQKPGQPPRLLIQLASNVQTGVPARFSGSGSRTDFTLTISSVEPEDFAVYYCLQSRTIPRTFGQGTKLEIKRGGGGSGGGGSGGGGSQVQLVQSGPEVKKPGESVKISCKASGYTFRHYSMNWVKQAPGQGLKWMGRINTESGVPIYADDFKGRFSFTVDTSASTAYLEISSLTSEDTAVYFCSNDYLYSLDFWGQGTTLTVSSTREQKLISEEDLAKPTTTPAPRPPTPAPTIASQPLSLRPEACRPAAGGAVHTRGLDFACDIYIWAPLAGTCGVLLLSLVITLYCKRGRKKLLYIFKQPFMRPVQTTQEEDGCSCRFPEEEEGGCELRVKFSRSADAPAYQQGQNQLYNELNLGRREEYDVLDKRRGRDPEMGGKPRRKNPQEGLYNELQKDKMAEAYSEIGMKGERRRGKGHDGLYQGLSTATKDTYDALHMQALPPRSSGSGEGRGSLLTCGDVEENPGPHMTEYKPTVRLATRDDVPRAVRTLAAAFADYPATRHTVDPDRHIERVTELQELFLTRVGLDIGKVWVADDGAAVAVWTTPESVEAGAVFAEIGPRMAELSGSRLAAQQQMEGLLAPHRPKEPAWFLATVGVSPDHQGKGLGSAVVLPGVEAAERAGVPAFLETSAPRNLPFYERLGFTVTADVEVPEGPRTWCMTRKPGA

SEQ ID NO: 3238 - protein, 727 aa, Artificial Sequence
  Synthetic Polypeptide
MALPVTALLLPLALLLHAARPQSVLTQPPSVSGAPGQRVTISCTGSSSNIGAGFDVHWYQQLPGTAPKLLIYGNSNRPSGVPDRFSGSKSGTSASLAITGLQAEDEADYYCQSYDSSLSGYVFGTGTKVTVLGGGGGSGGGGSGGGGSQVQLVQSGAEVKKPGASVKVSCKASGYTFTDYYMHWVRQAPGQRLEWMGWINPNSGGTNYAQKFQDRITVTRDTSSNTGYMELTRLRSDDTAVYYCARSPYSGVLDKWGQGTLVTVSSTREQKLISEEDLAKPTTTPAPRPPTPAPTIASQPLSLRPEACRPAAGGAVHTRGLDFACDIYIWAPLAGTCGVLLLSLVITLYCKRGRKKLLYIFKQPFMRPVQTTQEEDGCSCRFPEEEEGGCELRVKFSRSADAPAYQQGQNQLYNELNLGRREEYDVLDKRRGRDPEMGGKPRRKNPQEGLYNELQKDKMAEAYSEIGMKGERRRGKGHDGLYQGLSTATKDTYDALHMQALPPRSSGSGEGRGSLLTCGDVEENPGPHMTEYKPTVRLATRDDVPRAVRTLAAAFADYPATRHTVDPDRHIERVTELQELFLTRVGLDIGKVWVADDGAAVAVWTTPESVEAGAVFAEIGPRMAELSGSRLAAQQQMEGLLAPHRPKEPAWFLATVGVSPDHQGKGLGSAVVLPGVEAAERAGVPAFLETSAPRNLPFYERLGFTVTADVEVPEGPRTWCMTRKPGA

SEQ ID NO: 3239 - protein, 725 aa, Artificial Sequence
  Synthetic Polypeptide
MALPVTALLLPLALLLHAARPQAVLTQPPSASGTPGQRVTISCSGSSSNIGSYTVSWYQQLPGTAPKFLIYSNNQRPSGVPDRFSGSKSGTSASLAISGLQSEDEADYYCAAWDDSLNGYVFGTGTKVTVLGGGGGSGGGGSGGGGSEVQLVQSGAEVKKPGESLKISCKGSGYDFTTYWIGWVRQMPGKGLEWMGIIYPGDSDTRYSPSVRGRVTISADKSINTAYLQWSSLEASDTAMYYCARMWTFSQDGWGQGTLVTVSSTREQKLISEEDLAKPTTTPAPRPPTPAPTIASQPLSLRPEACRPAAGGAVHTRGLDFACDIYIWAPLAGTCGVLLLSLVITLYCKRGRKKLLYIFKQPFMRPVQTTQEEDGCSCRFPEEEEGGCELRVKFSRSADAPAYQQGQNQLYNELNLGRREEYDVLDKRRGRDPEMGGKPRRKNPQEGLYNELQKDKMAEAYSEIGMKGERRRGKGHDGLYQGLSTATKDTYDALHMQALPPRSSGSGEGRGSLLTCGDVEENPGPHMTEYKPTVRLATRDDVPRAVRTLAAAFADYPATRHTVDPDRHIERVTELQELFLTRVGLDIGKVWVADDGAAVAVWTTPESVEAGAVFAEIGPRMAELSGSRLAAQQQMEGLLAPHRPKEPAWFLATVGVSPDHQGKGLGSAVVLPGVEAAERAGVPAFLETSAPRNLPFYERLGFTVTADVEVPEGPRTWCMTRKPGA

SEQ ID NO: 3240 - protein, 736 aa, Artificial Sequence
  Synthetic Polypeptide
MALPVTALLLPLALLLHAARPLPVLTQPPSASGTPGQRVTISCSGRSSNIGSNSVNWYRQLPGAAPKLLIYSNNQRPPGVPVRFSGSKSGTSASLAISGLQSEDEATYYCATWDDNLNVHYVFGTGTKVTVLGSRGGGGSGGGGSGGGGSLEMAQVQLVQSGAEVKKPGSSVKVSCKASGGTFSSYAISWVRQAPGQGLEWMGRIIPILGIANYAQKFQGRVTITADKSTSTAYMELSSLRSEDTAVYYCARGGYYSHDMWSEDWGQGTLVTVSSTREQKLISEEDLAKPTTTPAPRPPTPAPTIASQPLSLRPEACRPAAGGAVHTRGLDFACDIYIWAPLAGTCGVLLLSLVITLYCKRGRKKLLYIFKQPFMRPVQTTQEEDGCSCRFPEEEEGGCELRVKFSRSADAPAYQQGQNQLYNELNLGRREEYDVLDKRRGRDPEMGGKPRRKNPQEGLYNELQKDKMAEAYSEIGMKGERRRGKGHDGLYQGLSTATKDTYDALHMQALPPRSSGSGEGRGSLLTCGDVEENPGPHMTEYKPTVRLATRDDVPRAVRTLAAAFADYPATRHTVDPDRHIERVTELQELFLTRVGLDIGKVWVADDGAAVAVWTTPESVEAGAVFAEIGPRMAELSGSRLAAQQQMEGLLAPHRPKEPAWFLATVGVSPDHQGKGLGSAVVLPGVEAAERAGVPAFLETSAPRNLPFYERLGFTVTADVEVPEGPRTWCMTRKPGA

SEQ ID NO: 3241 - protein, 725 aa, Artificial Sequence
  Synthetic Polypeptide
MALPVTALLLPLALLLHAARPDIVLTQSPASLAVSLGERATINCRASESVSVIGAHLIHWYQQKPGQPPKLLIYLASNLETGVPARFSGSGSGTDFTLTISSLQAEDAAIYYCLQSRIFPRTFGQGTKLEIKGGGGSGGGGSGGGGSQVQLVQSGSELKKPGESVKISCKASGYTFTDYSINWVKQAPGQGLKWMGWINTETREPAYAYDFRGRFVFSLDTSASTAYLQISSLKAEDTAVYFCALDYSYAMDYWGQGTLVTVSSTREQKLISEEDLAKPTTTPAPRPPTPAPTIASQPLSLRPEACRPAAGGAVHTRGLDFACDIYIWAPLAGTCGVLLLSLVITLYCKRGRKKLLYIFKQPFMRPVQTTQEEDGCSCRFPEEEEGGCELRVKFSRSADAPAYQQGQNQLYNELNLGRREEYDVLDKRRGRDPEMGGKPRRKNPQEGLYNELQKDKMAEAYSEIGMKGERRRGKGHDGLYQGLSTATKDTYDALHMQALPPRSSGSGEGRGSLLTCGDVEENPGPHMTEYKPTVRLATRDDVPRAVRTLAAAFADYPATRHTVDPDRHIERVTELQELFLTRVGLDIGKVWVADDGAAVAVWTTPESVEAGAVFAEIGPRMAELSGSRLAAQQQMEGLLAPHRPKEPAWFLATVGVSPDHQGKGLGSAVVLPGVEAAERAGVPAFLETSAPRNLPFYERLGFTVTADVEVPEGPRTWCMTRKPGA

SEQ ID NO: 3242 - protein, 726 aa, Artificial Sequence
  Synthetic Polypeptide
MALPVTALLLPLALLLHAARPDIVLTQSPATLSLSPGDRATLSCRASESVTILGSHLIYWYQQKPGQAPRLLIQLASNVQTGIPARFSGSGSRTDFTLTISSLEPEDFAVYYCLQSRTIPRTFGQGTKLEIKRGGGGSGGGGSGGGGSQVQLVQSGSELKKPGESVKISCKASGYTFTHYSMNWVRQAPGQGLEWMGRINTETGEPLYADDFKGRFVFSLDTSASTAYLQISSLKAEDTAVYYCSNDYLYSLDYWGQGTLVTVSSTREQKLISEEDLAKPTTTPAPRPPTPAPTIASQPLSLRPEACRPAAGGAVHTRGLDFACDIYIWAPLAGTCGVLLLSLVITLYCKRGRKKLLYIFKQPFMRPVQTTQEEDGCSCRFPEEEEGGCELRVKFSRSADAPAYQQGQNQLYNELNLGRREEYDVLDKRRGRDPEMGGKPRRKNPQEGLYNELQKDKMAEAYSEIGMKGERRRGKGHDGLYQGLSTATKDTYDALHMQALPPRSSGSGEGRGSLLTCGDVEENPGPHMTEYKPTVRLATRDDVPRAVRTLAAAFADYPATRHTVDPDRHIERVTELQELFLTRVGLDIGKVWVADDGAAVAVWTTPESVEAGAVFAEIGPRMAELSGSRLAAQQQMEGLLAPHRPKEPAWFLATVGVSPDHQGKGLGSAVVLPGVEAAERAGVPAFLETSAPRNLPFYERLGFTVTADVEVPEGPRTWCMTRKPGA

SEQ ID NO: 3243 - protein, 727 aa, Artificial Sequence
  Synthetic Polypeptide
MALPVTALLLPLALLLHAARPDIVMTQSPDSLAVSLGERATINCKSSQSILYSSNQKNYLAWYQQKPGQSPKLLIYWASTRESGVPDRFSGSGSGTDFTLTISSLQAEDVAVYYCHQYISSYTFGQGTKLEIKGGGGSGGGGSGGGGSQVQLVQSGAEVKKPGASVKVSCKASGYTFASQWMHWMRQAPGQGLEWIGWINPGNVNTKYNEKFKGRATLTVDTSTNTAYMELSSLRSEDTAVYYCARSTWYRPLDYWGQGTLVTVSSTREQKLISEEDLAKPTTTPAPRPPTPAPTIASQPLSLRPEACRPAAGGAVHTRGLDFACDIYIWAPLAGTCGVLLLSLVITLYCKRGRKKLLYIFKQPFMRPVQTTQEEDGCSCRFPEEEEGGCELRVKFSRSADAPAYQQGQNQLYNELNLGRREEYDVLDKRRGRDPEMGGKPRRKNPQEGLYNELQKDKMAEAYSEIGMKGERRRGKGHDGLYQGLSTATKDTYDALHMQALPPRSSGSGEGRGSLLTCGDVEENPGPHMTEYKPTVRLATRDDVPRAVRTLAAAFADYPATRHTVDPDRHIERVTELQELFLTRVGLDIGKVWVADDGAAVAVWTTPESVEAGAVFAEIGPRMAELSGSRLAAQQQMEGLLAPHRPKEPAWFLATVGVSPDHQGKGLGSAVVLPGVEAAERAGVPAFLETSAPRNLPFYERLGFTVTADVEVPEGPRTWCMTRKPGA

SEQ ID NO: 3244 - protein, 851 aa, Artificial Sequence
  Synthetic Polypeptide
MVRGVPFRHLLLVLQLALLPAATQGKKVVLGKKGDTVELTCTASQKKSIQFHWKNSNQIKILGNQGSFLTKGPSKLNDRADSRRSLWDQGNFPLIIKNLKIEDSDTYICEVEDQKEEVQLLVFGLTANSDTHLLQGQSLTLTLESPPGSSPSVQCRSPRGKNIQGGKTLSVSQLELQDSGTWTCTVLQNQKKVEFKIDIVVLAFQKASGGGGSGGGGSGGGGSIYQELTQLKAAVERLCHPCPWEWTFFQGNCYFMSNSQRNWHDSITACKEVGAQLVVIKSAEEQNFLQLQSSRSNRFTWMGLSDLNQEGTWQWVDGSPLLPSFKQYWNRGEPNNVGEEDCAEFSGNGWNDDKCNLAKFWICKKSAASCSRDEEQFLSPAPATPNPPPATREQKLISEEDLAKPTTTPAPRPPTPAPTIASQPLSLRPEACRPAAGGAVHTRGLDFACDIYIWAPLAGTCGVLLLSLVITLYCKRGRKKLLYIFKQPFMRPVQTTQEEDGCSCRFPEEEEGGCELRVKFSRSADAPAYQQGQNQLYNELNLGRREEYDVLDKRRGRDPEMGGKPRRKNPQEGLYNELQKDKMAEAYSEIGMKGERRRGKGHDGLYQGLSTATKDTYDALHMQALPPRSSGSGEGRGSLLTCGDVEENPGPHMTEYKPTVRLATRDDVPRAVRTLAAAFADYPATRHTVDPDRHIERVTELQELFLTRVGLDIGKVWVADDGAAVAVWTTPESVEAGAVFAEIGPRMAELSGSRLAAQQQMEGLLAPHRPKEPAWFLATVGVSPDHQGKGLGSAVVLPGVEAAERAGVPAFLETSAPRNLPFYERLGFTVTADVEVPEGPRTWCMTRKPGA

SEQ ID NO: 3245 - protein, 727 aa, Artificial Sequence
  Synthetic Polypeptide
MALPVTALLLPLALLLHAARPDHIVLTQSPSSLSASLGDRVTISCRASQDISTYLNWYQQKPDGTVKLLIFYTSRLHAGVPSRFSGSGSGTHHSLTISNLEQEDIATYFCQQGNSLPFTFGSGTKLEIKRGGGGSGGGGSGGGGSQVQLKESGPELEKPGASVKISCKASGYSFTAYSMNWVKQNNGMSLEWIGSIDPYYGDTKYAQKFKGKATLTVDKASSTAYLQLKSLTSEDSAVYYCARRMITTGDWYFDVWGAGTTVTVSSTREQKLISEEDLAKPTTTPAPRPPTPAPTIASQPLSLRPEACRPAAGGAVHTRGLDFACDIYIWAPLAGTCGVLLLSLVITLYCKRGRKKLLYIFKQPFMRPVQTTQEEDGCSCRFPEEEEGGCELRVKFSRSADAPAYQQGQNQLYNELNLGRREEYDVLDKRRGRDPEMGGKPRRKNPQEGLYNELQKDKMAEAYSEIGMKGERRRGKGHDGLYQGLSTATKDTYDALHMQALPPRSSGSGEGRGSLLTCGDVEENPGPHMTEYKPTVRLATRDDVPRAVRTLAAAFADYPATRHTVDPDRHIERVTELQELFLTRVGLDIGKVWVADDGAAVAVWTTPESVEAGAVFAEIGPRMAELSGSRLAAQQQMEGLLAPHRPKEPAWFLATVGVSPDHQGKGLGSAVVLPGVEAAERAGVPAFLETSAPRNLPFYERLGFTVTADVEVPEGPRTWCMTRKPGA

SEQ ID NO: 3246 - protein, 727 aa, Artificial Sequence; identical to SEQ ID NO: 3245
  Synthetic Polypeptide

SEQ ID NO: 3247 - protein, 674 aa, Artificial Sequence
  Synthetic Polypeptide
MALPVTALLLPLALLLHAARPGMRTEDLPKAVVFLEPQWYRVLEKDSVTLKCQGAYSPEDNSTQWFHNESLISSQASSYFIDAATVDDSGEYRCQTNLSTLSDPVQLEVHIGWLLLQAPRWVFKEEDPIHLRCHSWKNTALHKVTYLQNGKGRKYFHHNSDFYIPKATLKDSGSYFCRGLVGSKNVSSETVNITITQGLAVSTISSFFPPGYQTREQKLISEEDLAKPTTTPAPRPPTPAPTIASQPLSLRPEACRPAAGGAVHTRGLDFACDIYIWAPLAGTCGVLLLSLVITLYCKRGRKKLLYIFKQPFMRPVQTTQEEDGCSCRFPEEEEGGCELRVKFSRSADAPAYQQGQNQLYNELNLGRREEYDVLDKRRGRDPEMGGKPRRKNPQEGLYNELQKDKMAEAYSEIGMKGERRRGKGHDGLYQGLSTATKDTYDALHMQALPPRSSGSGEGRGSLLTCGDVEENPGPHMTEYKPTVRLATRDDVPRAVRTLAAAFADYPATRHTVDPDRHIERVTELQELFLTRVGLDIGKVWVADDGAAVAVWTTPESVEAGAVFAEIGPRMAELSGSRLAAQQQMEGLLAPHRPKEPAWFLATVGVSPDHQGKGLGSAVVLPGVEAAERAGVPAFLETSAPRNLPFYERLGFTVTADVEVPEGPRTWCMTRKPGA

SEQ ID NO: 3248 - protein, 674 aa, Artificial Sequence; identical to SEQ ID NO: 3247
  Synthetic Polypeptide

SEQ ID NO: 3249 - protein, 727 aa, Artificial Sequence
  Synthetic Polypeptide
MALPVTALLLPLALLLHAARPDEIVLTQSPATLSLSPGERATLSCRASQSVSSYLAWYQQKPGQAPRLLIYDASNRATGIPARFSGSGSGTDFTLTISSLEPEDFAVYYCQQRSNWPITFGQGTRLEIKGGGGSGGGGSGGGGSEVQLVESGGGLVQPGRSLRLSCAASGFTFNDYAMHWVRQAPGKGLEWVSTISWNSGSIGYADSVKGRFTISRDNAKKSLYLQMNSLRAEDTALYYCAKDIQYGNYYYGMDVWGQGTTVTVSSTREQKLISEEDLAKPTTTPAPRPPTPAPTIASQPLSLRPEACRPAAGGAVHTRGLDFACDIYIWAPLAGTCGVLLLSLVITLYCKRGRKKLLYIFKQPFMRPVQTTQEEDGCSCRFPEEEEGGCELRVKFSRSADAPAYQQGQNQLYNELNLGRREEYDVLDKRRGRDPEMGGKPRRKNPQEGLYNELQKDKMAEAYSEIGMKGERRRGKGHDGLYQGLSTATKDTYDALHMQALPPRSSGSGEGRGSLLTCGDVEENPGPHMTEYKPTVRLATRDDVPRAVRTLAAAFADYPATRHTVDPDRHIERVTELQELFLTRVGLDIGKVWVADDGAAVAVWTTPESVEAGAVFAEIGPRMAELSGSRLAAQQQMEGLLAPHRPKEPAWFLATVGVSPDHQGKGLGSAVVLPGVEAAERAGVPAFLETSAPRNLPFYERLGFTVTADVEVPEGPRTWCMTRKPGA

SEQ ID NO: 3250 - protein, 729 aa, Artificial Sequence
  Synthetic Polypeptide
MALPVTALLLPLALLLHAARPDIVMTQTPLSLPVTPGEPASISCRSSKSLLHSNGITYLYWYLQKPGQSPQLLIYQMSNLVSGVPDRFSGSGSGTDFTLKISRVEAEDVGVYYCAQNLELPYTFGGGTKVEIKRGGGGSGGGGSGGGGSQVQLVQSGAEVKKPGSSVKVSCKASGYAFSYSWINWVRQAPGQGLEWMGRIFPGDGDTDYNGKFKGRVTITADKSTSTAYMELSSLRSEDTAVYYCARNVFDGYWLVYWGQGTLVTVSSTREQKLISEEDLAKPTTTPAPRPPTPAPTIASQPLSLRPEACRPAAGGAVHTRGLDFACDIYIWAPLAGTCGVLLLSLVITLYCKRGRKKLLYIFKQPFMRPVQTTQEEDGCSCRFPEEEEGGCELRVKFSRSADAPAYQQGQNQLYNELNLGRREEYDVLDKRRGRDPEMGGKPRRKNPQEGLYNELQKDKMAEAYSEIGMKGERRRGKGHDGLYQGLSTATKDTYDALHMQALPPRSSGSGEGRGSLLTCGDVEENPGPHMTEYKPTVRLATRDDVPRAVRTLAAAFADYPATRHTVDPDRHIERVTELQELFLTRVGLDIGKVWVADDGAAVAVWTTPESVEAGAVFAEIGPRMAELSGSRLAAQQQMEGLLAPHRPKEPAWFLATVGVSPDHQGKGLGSAVVLPGVEAAERAGVPAFLETSAPRNLPFYERLGFTVTADVEVPEGPRTWCMTRKPGA

SEQ ID NO: 3251 - protein, 726 aa, Artificial Sequence
  Synthetic Polypeptide
MALPVTALLLPLALLLHAARPDIVLTQSPAIITASPGEKVTMTCRASSSVNYMDWYQKKPGSSPKPWIYATSNLASGVPSRFSGSGSGTTYSMTISSLEAEDAATYYCQQWSFNPPTFGGGTKLEIKRGGGGSGGGGSGGGGSEVQLQQSGAELKKPGASVKVSCKASGYTFTSYNMHWVKQTPGQGLEWIGAIYPGNGDTSYNQKFKGKTTLTADKSSSTAYMELSSLRSEDTAVYYCARSNYYGSSYWFFDVWGTGTTVTVSSTREQKLISEEDLAKPTTTPAPRPPTPAPTIASQPLSLRPEACRPAAGGAVHTRGLDFACDIYIWAPLAGTCGVLLLSLVITLYCKRGRKKLLYIFKQPFMRPVQTTQEEDGCSCRFPEEEEGGCELRVKFSRSADAPAYQQGQNQLYNELNLGRREEYDVLDKRRGRDPEMGGKPRRKNPQEGLYNELQKDKMAEAYSEIGMKGERRRGKGHDGLYQGLSTATKDTYDALHMQALPPRSSGSGEGRGSLLTCGDVEENPGPHMTEYKPTVRLATRDDVPRAVRTLAAAFADYPATRHTVDPDRHIERVTELQELFLTRVGLDIGKVWVADDGAAVAVWTTPESVEAGAVFAEIGPRMAELSGSRLAAQQQMEGLLAPHRPKEPAWFLATVGVSPDHQGKGLGSAVVLPGVEAAERAGVPAFLETSAPRNLPFYERLGFTVTADVEVPEGPRTWCMTRKPGA

SEQ ID NO: 3252 - protein, 729 aa, Artificial Sequence
  Synthetic Polypeptide
MALPVTALLLPLALLLHAARPEIVLTQSPATLSLSPGERATLSCRASQSVSSYLAWYQQKPGQAPRLLIYDASNRATGIPARFSGSGSGTDFTLTISSLEPEDFAVYYCQQRSDWPLTFGGGTKVEIKGGGGSGGGGSGGGGSEVQLVQSGGGLVHPGGSLRLSCTGSGFTFSYHAMHWVRQAPGKGLEWVSIIGTGGVTYYADSVKGRFTISRDNVKNSLYLQMNSLRAEDMAVYYCARDYYGAGSFYDGLYGMDVWGQGTTVTVSSTREQKLISEEDLAKPTTTPAPRPPTPAPTIASQPLSLRPEACRPAAGGAVHTRGLDFACDIYIWAPLAGTCGVLLLSLVITLYCKRGRKKLLYIFKQPFMRPVQTTQEEDGCSCRFPEEEEGGCELRVKFSRSADAPAYQQGQNQLYNELNLGRREEYDVLDKRRGRDPEMGGKPRRKNPQEGLYNELQKDKMAEAYSEIGMKGERRRGKGHDGLYQGLSTATKDTYDALHMQALPPRSSGSGEGRGSLLTCGDVEENPGPHMTEYKPTVRLATRDDVPRAVRTLAAAFADYPATRHTVDPDRHIERVTELQELFLTRVGLDIGKVWVADDGAAVAVWTTPESVEAGAVFAEIGPRMAELSGSRLAAQQQMEGLLAPHRPKEPAWFLATVGVSPDHQGKGLGSAVVLPGVEAAERAGVPAFLETSAPRNLPFYERLGFTVTADVEVPEGPRTWCMTRKPGA

SEQ ID NO: 3253 - protein, 727 aa, Artificial Sequence
  Synthetic Polypeptide
MALPVTALLLPLALLLHAARPEIVLTQSPATLSLSPGERATLSCRASQSVSSYLAWYQQKPGQAPRLLIYDASNRATGIPARFSGSGSGTDFTLTISSLEPEDFAVYYCQQRSNWPLTFGGGTKVEIKGGGGSGGGGSGGGGSAVQLVESGGGLVQPGRSLRLSCAASGFTFGDYTMHWVRQAPGKGLEWVSGISWNSGSIGYADSVKGRFTISRDNAKNSLYLQMNSLRAEDTALYYCTKDNQYGSGSTYGLGVWGQGTLVTVSSTREQKLISEEDLAKPTTTPAPRPPTPAPTIASQPLSLRPEACRPAAGGAVHTRGLDFACDIYIWAPLAGTCGVLLLSLVITLYCKRGRKKLLYIFKQPFMRPVQTTQEEDGCSCRFPEEEEGGCELRVKFSRSADAPAYQQGQNQLYNELNLGRREEYDVLDKRRGRDPEMGGKPRRKNPQEGLYNELQKDKMAEAYSEIGMKGERRRGKGHDGLYQGLSTATKDTYDALHMQALPPRSSGSGEGRGSLLTCGDVEENPGPHMTEYKPTVRLATRDDVPRAVRTLAAAFADYPATRHTVDPDRHIERVTELQELFLTRVGLDIGKVWVADDGAAVAVWTTPESVEAGAVFAEIGPRMAELSGSRLAAQQQMEGLLAPHRPKEPAWFLATVGVSPDHQGKGLGSAVVLPGVEAAERAGVPAFLETSAPRNLPFYERLGFTVTADVEVPEGPRTWCMTRKPGA

SEQ ID NO: 3254 - protein, 726 aa, Artificial Sequence
  Synthetic Polypeptide
MALPVTALLLPLALLLHAARPDIQMTQSPSSLSASVGDRVTITCRASSSVSYMHWYQQKPGKAPKPLIYAPSNLASGVPSRFSGSGSGTDFTLTISSLQPEDFATYYCQQWSFNPPTFGQGTKVEIKRGGGGSGGGGSGGGGSEVQLVESGGGLVQPGGSLRLSCAASGYTFTSYNMHWVRQAPGKGLEWVGAIYPGNGDTSYNQKFKGRFTISVDKSKNTLYLQMNSLRAEDTAVYYCARVVYYSNSYWYFDVWGQGTLVTVSSTREQKLISEEDLAKPTTTPAPRPPTPAPTIASQPLSLRPEACRPAAGGAVHTRGLDFACDIYIWAPLAGTCGVLLLSLVITLYCKRGRKKLLYIFKQPFMRPVQTTQEEDGCSCRFPEEEEGGCELRVKFSRSADAPAYQQGQNQLYNELNLGRREEYDVLDKRRGRDPEMGGKPRRKNPQEGLYNELQKDKMAEAYSEIGMKGERRRGKGHDGLYQGLSTATKDTYDALHMQALPPRSSGSGEGRGSLLTCGDVEENPGPHMTEYKPTVRLATRDDVPRAVRTLAAAFADYPATRHTVDPDRHIERVTELQELFLTRVGLDIGKVWVADDGAAVAVWTTPESVEAGAVFAEIGPRMAELSGSRLAAQQQMEGLLAPHRPKEPAWFLATVGVSPDHQGKGLGSAVVLPGVEAAERAGVPAFLETSAPRNLPFYERLGFTVTADVEVPEGPRTWCMTRKPGA

SEQ ID NO: 3255 - protein, 724 aa, Artificial Sequence
  Synthetic Polypeptide
MALPVTALLLPLALLLHAARPDIQLTQSPSSLSASVGDRVTMTCRASSSVSYIHWFQQKPGKAPKPWIYATSNLASGVPVRFSGSGSGTDYTFTISSLQPEDIATYYCQQWTSNPPTFGGGTKLEIKGGGGSGGGGSGGGGSQVQLQQSGAEVKKPGSSVKVSCKASGYTFTSYNMHWVKQAPGQGLEWIGAIYPGNGDTSYNQKFKGKATLTADESTNTAYMELSSLRSEDTAFYYCARSTYYGGDWYFDVWGQGTTVTVSSTREQKLISEEDLAKPTTTPAPRPPTPAPTIASQPLSLRPEACRPAAGGAVHTRGLDFACDIYIWAPLAGTCGVLLLSLVITLYCKRGRKKLLYIFKQPFMRPVQTTQEEDGCSCRFPEEEEGGCELRVKFSRSADAPAYQQGQNQLYNELNLGRREEYDVLDKRRGRDPEMGGKPRRKNPQEGLYNELQKDKMAEAYSEIGMKGERRRGKGHDGLYQGLSTATKDTYDALHMQALPPRSSGSGEGRGSLLTCGDVEENPGPHMTEYKPTVRLATRDDVPRAVRTLAAAFADYPATRHTVDPDRHIERVTELQELFLTRVGLDIGKVWVADDGAAVAVWTTPESVEAGAVFAEIGPRMAELSGSRLAAQQQMEGLLAPHRPKEPAWFLATVGVSPDHQGKGLGSAVVLPGVEAAERAGVPAFLETSAPRNLPFYERLGFTVTADVEVPEGPRTWCMTRKPGA

SEQ ID NO: 3256 - protein, 736 aa, Artificial Sequence
  Synthetic Polypeptide
MALPVTALLLPLALLLHAARPSTVMTQSPDSLAVSLGERATINCKSSQSNSNDVAWYQQKPGQSPKVLIYFASNRYSGVPDRFSGSGYGTDFTLTISSLQAEDVAVYFCQQDYSSPLTFGAGTKLELKRADAGGGGSGGGGSGGGGSQIQLVQSGSELKKPGASVKVSCKASGYTFTNFGVNWVRQAPGKGLEWMGWINTYTGEPSYAQGFTGRFVFSLDASVSTAYLQISSLKAEDTATYFCTRRTNYYGTSYYYAMDYWGQGTTVTVSSAKTTTREQKLISEEDLAKPTTTPAPRPPTPAPTIASQPLSLRPEACRPAAGGAVHTRGLDFACDIYIWAPLAGTCGVLLLSLVITLYCKRGRKKLLYIFKQPFMRPVQTTQEEDGCSCRFPEEEEGGCELRVKFSRSADAPAYQQGQNQLYNELNLGRREEYDVLDKRRGRDPEMGGKPRRKNPQEGLYNELQKDKMAEAYSEIGMKGERRRGKGHDGLYQGLSTATKDTYDALHMQALPPRSSGSGEGRGSLLTCGDVEENPGPHMTEYKPTVRLATRDDVPRAVRTLAAAFADYPATRHTVDPDRHIERVTELQELFLTRVGLDIGKVWVADDGAAVAVWTTPESVEAGAVFAEIGPRMAELSGSRLAAQQQMEGLLAPHRPKEPAWFLATVGVSPDHQGKGLGSAVVLPGVEAAERAGVPAFLETSAPRNLPFYERLGFTVTADVEVPEGPRTWCMTRKPGA

SEQ ID NO: 3257 - protein, 728 aa, Artificial Sequence
  Synthetic Polypeptide
MALPVTALLLPLALLLHAARPQIVLSQSPAILSASPGEKVTMTCRASSSVSYMHWYQQKPGSSPKPWIYATSNLASGVPARFSGSGSGTSYSFTISRVEAEDAATYYCQQWTFNPPTFGGGTRLEIKRTVAAGGGGSGGGGSGGGGSQAYLQQSGAELVRPGASVKMSCKASGYTFTSYNMHWVKQTPRQGLEWIGGIYPGNGDTSYNQKFKGKATLTVGKSSSTAYMQLSSLTSEDSAVYFCARYDYNYAMDYWGQGTSVTVSSASTREQKLISEEDLAKPTTTPAPRPPTPAPTIASQPLSLRPEACRPAAGGAVHTRGLDFACDIYIWAPLAGTCGVLLLSLVITLYCKRGRKKLLYIFKQPFMRPVQTTQEEDGCSCRFPEEEEGGCELRVKFSRSADAPAYQQGQNQLYNELNLGRREEYDVLDKRRGRDPEMGGKPRRKNPQEGLYNELQKDKMAEAYSEIGMKGERRRGKGHDGLYQGLSTATKDTYDALHMQALPPRSSGSGEGRGSLLTCGDVEENPGPHMTEYKPTVRLATRDDVPRAVRTLAAAFADYPATRHTVDPDRHIERVTELQELFLTRVGLDIGKVWVADDGAAVAVWTTPESVEAGAVFAEIGPRMAELSGSRLAAQQQMEGLLAPHRPKEPAWFLATVGVSPDHQGKGLGSAVVLPGVEAAERAGVPAFLETSAPRNLPFYERLGFTVTADVEVPEGPRTWCMTRKPGA

SEQ ID NO: 3258 - protein, 726 aa, Artificial Sequence; identical to SEQ ID NO: 3254
  Synthetic Polypeptide

SEQ ID NO: 3259 - protein, 725 aa, Artificial Sequence
  Synthetic Polypeptide
MALPVTALLLPLALLLHAARPEIVLTQSPSSLSASVGDRVTITCRASSSLSFMHWYQQKPGKAPKPWIYATSNLASGVPSRFSGSGSGTDYTLTISSLQPEDFATYFCHQWSSNPLTFGGGTKVEIKGGGGSGGGGSGGGGSQVQLVQSGAEVKKPGASVKVSCKASGYTFTSYNMHWVRQAPGQRLEWIGAIYPGNGDTSYNQKFKGRVTVTRDTSANTAYMELSSLKSEDTAVYYCARSHYGSNYVDYFDYWGQGTLVTVSSTREQKLISEEDLAKPTTTPAPRPPTPAPTIASQPLSLRPEACRPAAGGAVHTRGLDFACDIYIWAPLAGTCGVLLLSLVITLYCKRGRKKLLYIFKQPFMRPVQTTQEEDGCSCRFPEEEEGGCELRVKFSRSADAPAYQQGQNQLYNELNLGRREEYDVLDKRRGRDPEMGGKPRRKNPQEGLYNELQKDKMAEAYSEIGMKGERRRGKGHDGLYQGLSTATKDTYDALHMQALPPRSSGSGEGRGSLLTCGDVEENPGPHMTEYKPTVRLATRDDVPRAVRTLAAAFADYPATRHTVDPDRHIERVTELQELFLTRVGLDIGKVWVADDGAAVAVWTTPESVEAGAVFAEIGPRMAELSGSRLAAQQQMEGLLAPHRPKEPAWFLATVGVSPDHQGKGLGSAVVLPGVEAAERAGVPAFLETSAPRNLPFYERLGFTVTADVEVPEGPRTWCMTRKPGA

SEQ ID NO: 3260 - protein, 727 aa, Artificial Sequence
  Synthetic Polypeptide
MALPVTALLLPLALLLHAARPDEIVLTQSPATLSLSPGERATLSCRASQSVSSYLAWYQQKPGQAPRLLIYDASNRATGIPARFSGSGSGTDFTLTISSLEPEDFAVYYCQQRSNWPITFGQGTRLEIKGGGGSGGGGSGGGGSEVQLVESGGGLVQPDRSLRLSCAASGFTFHDYAMHWVRQAPGKGLEWVSTISWNSGTIGYADSVKGRFTISRDNAKNSLYLQMNSLRAEDTALYYCAKDIQYGNYYYGMDVWGQGTTVTVSSTREQKLISEEDLAKPTTTPAPRPPTPAPTIASQPLSLRPEACRPAAGGAVHTRGLDFACDIYIWAPLAGTCGVLLLSLVITLYCKRGRKKLLYIFKQPFMRPVQTTQEEDGCSCRFPEEEEGGCELRVKFSRSADAPAYQQGQNQLYNELNLGRREEYDVLDKRRGRDPEMGGKPRRKNPQEGLYNELQKDKMAEAYSEIGMKGERRRGKGHDGLYQGLSTATKDTYDALHMQALPPRSSGSGEGRGSLLTCGDVEENPGPHMTEYKPTVRLATRDDVPRAVRTLAAAFADYPATRHTVDPDRHIERVTELQELFLTRVGLDIGKVWVADDGAAVAVWTTPESVEAGAVFAEIGPRMAELSGSRLAAQQQMEGLLAPHRPKEPAWFLATVGVSPDHQGKGLGSAVVLPGVEAAERAGVPAFLETSAPRNLPFYERLGFTVTADVEVPEGPRTWCMTRKPGA

SEQ ID NO: 3261 - protein, 725 aa, Artificial Sequence
  Synthetic Polypeptide
MALPVTALLLPLALLLHAARPEIVLTQSPGTLSLSPGERATLSCRASSSVPYIHWYQQKPGQAPRLLIYATSALASGIPDRFSGSGSGTDFTLTISRLEPEDFAVYYCQQWLSNPPTFGQGTKLELKRGGGGSGGGGSGGGGSEVQLVQSGAEVKKPGESLKLSCKGSGRTFTSYNMHWVRQMPGKGLEWMGAIYPLTGDTSYNQKSKLQVTISADKSISTAYLQWSSLKASDTAMYYCARSTYVGGDWQFDVWGKGTTVTVSSTREQKLISEEDLAKPTTTPAPRPPTPAPTIASQPLSLRPEACRPAAGGAVHTRGLDFACDIYIWAPLAGTCGVLLLSLVITLYCKRGRKKLLYIFKQPFMRPVQTTQEEDGCSCRFPEEEEGGCELRVKFSRSADAPAYQQGQNQLYNELNLGRREEYDVLDKRRGRDPEMGGKPRRKNPQEGLYNELQKDKMAEAYSEIGMKGERRRGKGHDGLYQGLSTATKDTYDALHMQALPPRSSGSGEGRGSLLTCGDVEENPGPHMTEYKPTVRLATRDDVPRAVRTLAAAFADYPATRHTVDPDRHIERVTELQELFLTRVGLDIGKVWVADDGAAVAVWTTPESVEAGAVFAEIGPRMAELSGSRLAAQQQMEGLLAPHRPKEPAWFLATVGVSPDHQGKGLGSAVVLPGVEAAERAGVPAFLETSAPRNLPFYERLGFTVTADVEVPEGPRTWCMTRKPGA

SEQ ID NO: 3262 - protein, 730 aa, Artificial Sequence
  Synthetic Polypeptide
MALPVTALLLPLALLLHAARPDIQMTQSPSSLSASVGDRVTITCRSSQSIVHSVGNTFLEWYQQKPGKAPKLLIYKVSNRFSGVPSRFSGSGSGTDFTLTISSLQPEDFATYYCFQGSQFPYTFGQGTKVEIKRGGGGSGGGGSGGGGSEVQLVESGGGLVQPGGSLRLSCAASGYEFSRSWMNWVRQAPGKGLEWVGRIYPGDGDTNYSGKFKGRFTISADTSKNTAYLQMNSLRAEDTAVYYCARDGSSWDWYFDVWGQGTLVTVSSTREQKLISEEDLAKPTTTPAPRPPTPAPTIASQPLSLRPEACRPAAGGAVHTRGLDFACDIYIWAPLAGTCGVLLLSLVITLYCKRGRKKLLYIFKQPFMRPVQTTQEEDGCSCRFPEEEEGGCELRVKFSRSADAPAYQQGQNQLYNELNLGRREEYDVLDKRRGRDPEMGGKPRRKNPQEGLYNELQKDKMAEAYSEIGMKGERRRGKGHDGLYQGLSTATKDTYDALHMQALPPRSSGSGEGRGSLLTCGDVEENPGPHMTEYKPTVRLATRDDVPRAVRTLAAAFADYPATRHTVDPDRHIERVTELQELFLTRVGLDIGKVWVADDGAAVAVWTTPESVEAGAVFAEIGPRMAELSGSRLAAQQQMEGLLAPHRPKEPAWFLATVGVSPDHQGKGLGSAVVLPGVEAAERAGVPAFLETSAPRNLPFYERLGFTVTADVEVPEGPRTWCMTRKPGA

SEQ ID NO: 3263 - protein, 722 aa, Artificial Sequence
  Synthetic Polypeptide
MALPVTALLLPLALLLHAARPDIVMTQSPSSLSASVGDRVTITCKASQSVTNDVAWYQQKPGKAPKLLIYYASNRYTGVPSRFSGSGSGTDFTLTISSLQPEDFATYYCQQDYRSPWTFGGGTKVEIKRGGGGSGGGGSGGGGSQVQLEESGGGVVRPGRSLRLSCAASGFTFSDYGVNWIRQAPGKGLEWVTIIWGDGRTDYNSALKSRFTVSRNNSNNTLSLQMNSLTTEDTAVYYCVRAPGNRAMEYWGQGVLVTVSSTREQKLISEEDLAKPTTTPAPRPPTPAPTIASQPLSLRPEACRPAAGGAVHTRGLDFACDIYIWAPLAGTCGVLLLSLVITLYCKRGRKKLLYIFKQPFMRPVQTTQEEDGCSCRFPEEEEGGCELRVKFSRSADAPAYQQGQNQLYNELNLGRREEYDVLDKRRGRDPEMGGKPRRKNPQEGLYNELQKDKMAEAYSEIGMKGERRRGKGHDGLYQGLSTATKDTYDALHMQALPPRSSGSGEGRGSLLTCGDVEENPGPHMTEYKPTVRLATRDDVPRAVRTLAAAFADYPATRHTVDPDRHIERVTELQELFLTRVGLDIGKVWVADDGAAVAVWTTPESVEAGAVFAEIGPRMAELSGSRLAAQQQMEGLLAPHRPKEPAWFLATVGVSPDHQGKGLGSAVVLPGVEAAERAGVPAFLETSAPRNLPFYERLGFTVTADVEVPEGPRTWCMTRKPGA

SEQ ID NO: 3264 - protein, 728 aa, Artificial Sequence
  Synthetic Polypeptide
MALPVTALLLPLALLLHAARPDIQMTQSPSSLSASVGDRVTITCRASQTIWSYLNWYQQRPGKAPNLLIYAASSLQSGVPSRFSGRGSGTDFTLTISSLQAEDFATYYCQQSYSIPQIFGQGTKLEIKGGGGSGGGGSGGGGSQVQLQQSGPGLVKPSQTLSLTCAISGDSVSSNSAAWNWIRQSPSRGLEWLGRTYYRSKWYNDYAVSVKSRITINPDTSKNQFSLQLNSVTPEDTAVYYCAREVTGDLEDAFDIWGQGTMVTVSSTREQKLISEEDLAKPTTTPAPRPPTPAPTIASQPLSLRPEACRPAAGGAVHTRGLDFACDIYIWAPLAGTCGVLLLSLVITLYCKRGRKKLLYIFKQPFMRPVQTTQEEDGCSCRFPEEEEGGCELRVKFSRSADAPAYQQGQNQLYNELNLGRREEYDVLDKRRGRDPEMGGKPRRKNPQEGLYNELQKDKMAEAYSEIGMKGERRRGKGHDGLYQGLSTATKDTYDALHMQALPPRSSGSGEGRGSLLTCGDVEENPGPHMTEYKPTVRLATRDDVPRAVRTLAAAFADYPATRHTVDPDRHIERVTELQELFLTRVGLDIGKVWVADDGAAVAVWTTPESVEAGAVFAEIGPRMAELSGSRLAAQQQMEGLLAPHRPKEPAWFLATVGVSPDHQGKGLGSAVVLPGVEAAERAGVPAFLETSAPRNLPFYERLGFTVTADVEVPEGPRTWCMTRKPGA

SEQ ID NO: 3265 - protein, 728 aa, Artificial Sequence
  Synthetic Polypeptide
MALPVTALLLPLALLLHAARPQVQLQQSGPGLVKPSQTLSLTCAISGDSVSSNSAAWNWIRQSPSRGLEWLGRTYYRSKWYNDYAVSVKSRITINPDTSKNQFSLQLNSVTPEDTAVYYCAREVTGDLEDAFDIWGQGTMVTVSSGGGGSGGGGSGGGGSDIQMTQSPSSLSASVGDRVTITCRASQTIWSYLNWYQQRPGKAPNLLIYAASSLQSGVPSRFSGRGSGTDFTLTISSLQAEDFATYYCQQSYSIPQIFGQGTKLEIKTREQKLISEEDLAKPTTTPAPRPPTPAPTIASQPLSLRPEACRPAAGGAVHTRGLDFACDIYIWAPLAGTCGVLLLSLVITLYCKRGRKKLLYIFKQPFMRPVQTTQEEDGCSCRFPEEEEGGCELRVKFSRSADAPAYQQGQNQLYNELNLGRREEYDVLDKRRGRDPEMGGKPRRKNPQEGLYNELQKDKMAEAYSEIGMKGERRRGKGHDGLYQGLSTATKDTYDALHMQALPPRSSGSGEGRGSLLTCGDVEENPGPHMTEYKPTVRLATRDDVPRAVRTLAAAFADYPATRHTVDPDRHIERVTELQELFLTRVGLDIGKVWVADDGAAVAVWTTPESVEAGAVFAEIGPRMAELSGSRLAAQQQMEGLLAPHRPKEPAWFLATVGVSPDHQGKGLGSAVVLPGVEAAERAGVPAFLETSAPRNLPFYERLGFTVTADVEVPEGPRTWCMTRKPGA

SEQ ID NO: 3266 - protein, 721 aa, Artificial Sequence
  Synthetic Polypeptide
MALPVTALLLPLALLLHAARPDIQMTQSPATIENTSLSASVGDRVTITCRASQGISSWLTWYQQKPEKAPKSLIYAASSLQSGVPSRFSGSGSGTDFTLTISSLQPEDFATYYCQQYDSYPITFGQGTRLEIKGGGGSGGGGSGGGGSQVQLQQWGAGLLKPSETLSLTCAVYGGSFSAYYWSWIRQPPGKGLEWIGDINHGGGTNYNPSLKSRVTISVDTSKNQFSLKLNSVTAADTAVYYCASLTAYWGQGSLVTVSSTREQKLISEEDLAKPTTTPAPRPPTPAPTIASQPLSLRPEACRPAAGGAVHTRGLDFACDIYIWAPLAGTCGVLLLSLVITLYCKRGRKKLLYIFKQPFMRPVQTTQEEDGCSCRFPEEEEGGCELRVKFSRSADAPAYQQGQNQLYNELNLGRREEYDVLDKRRGRDPEMGGKPRRKNPQEGLYNELQKDKMAEAYSEIGMKGERRRGKGHDGLYQGLSTATKDTYDALHMQALPPRSSGSGEGRGSLLTCGDVEENPGPHMTEYKPTVRLATRDDVPRAVRTLAAAFADYPATRHTVDPDRHIERVTELQELFLTRVGLDIGKVWVADDGAAVAVWTTPESVEAGAVFAEIGPRMAELSGSRLAAQQQMEGLLAPHRPKEPAWFLATVGVSPDHQGKGLGSAVVLPGVEAAERAGVPAFLETSAPRNLPFYERLGFTVTADVEVPEGPRTWCMTRKPGA

SEQ ID NO: 3267 - protein, 726 aa, Artificial Sequence
  Synthetic Polypeptide
MALPVTALLLPLALLLHAARPDEIVLTQSPDSLAVSLGERATINCKASQSVDFDGDSYLNWYQQKPGQPPKVLIYAASTLQSGVPSRFSGSGSGTDFTLTINSLEAEDAATYYCQQSNEDPWTFGGGTKVEIKGGGGSGGGGSGGGGSQVQLVQSGAEVKKPGASVKVSCKVSGYTFTDYYITWVRQAPGQALEWMGWIYPGSGNTKYSQKFQGRFVFSVDTSASTAYLQLSSLKAEDTAVYYCANYGNYWFAYWGQGTLVTVSSTREQKLISEEDLAKPTTTPAPRPPTPAPTIASQPLSLRPEACRPAAGGAVHTRGLDFACDIYIWAPLAGTCGVLLLSLVITLYCKRGRKKLLYIFKQPFMRPVQTTQEEDGCSCRFPEEEEGGCELRVKFSRSADAPAYQQGQNQLYNELNLGRREEYDVLDKRRGRDPEMGGKPRRKNPQEGLYNELQKDKMAEAYSEIGMKGERRRGKGHDGLYQGLSTATKDTYDALHMQALPPRSSGSGEGRGSLLTCGDVEENPGPHMTEYKPTVRLATRDDVPRAVRTLAAAFADYPATRHTVDPDRHIERVTELQELFLTRVGLDIGKVWVADDGAAVAVWTTPESVEAGAVFAEIGPRMAELSGSRLAAQQQMEGLLAPHRPKEPAWFLATVGVSPDHQGKGLGSAVVLPGVEAAERAGVPAFLETSAPRNLPFYERLGFTVTADVEVPEGPRTWCMTRKPGA

SEQ ID NO: 3268 - protein, 723 aa, Artificial Sequence
  Synthetic Polypeptide
MALPVTALLLPLALLLHAARPDIQMTQSPSSLSASVGDRVTITCRASQGISSWLAWYQQKPEKAPKSLIYAASSLQSGVPSRFSGSGSGTDFTLTISSLQPEDFATYYCQQYNSYPPTFGGGTKVEIKGGGGSGGGGSGGGGSEVQLVQSGGGLVHPGGSLRLSCAGSGFAFSSSTMHWIRQAPGKGLEWISLIGSGGGIYYGDSVKGRFTISRDNAKNSLYLQMNSLRAEDMAVYYCVRGYFDWVDYFDYWGQGTLVTVSSTREQKLISEEDLAKPTTTPAPRPPTPAPTIASQPLSLRPEACRPAAGGAVHTRGLDFACDIYIWAPLAGTCGVLLLSLVITLYCKRGRKKLLYIFKQPFMRPVQTTQEEDGCSCRFPEEEEGGCELRVKFSRSADAPAYQQGQNQLYNELNLGRREEYDVLDKRRGRDPEMGGKPRRKNPQEGLYNELQKDKMAEAYSEIGMKGERRRGKGHDGLYQGLSTATKDTYDALHMQALPPRSSGSGEGRGSLLTCGDVEENPGPHMTEYKPTVRLATRDDVPRAVRTLAAAFADYPATRHTVDPDRHIERVTELQELFLTRVGLDIGKVWVADDGAAVAVWTTPESVEAGAVFAEIGPRMAELSGSRLAAQQQMEGLLAPHRPKEPAWFLATVGVSPDHQGKGLGSAVVLPGVEAAERAGVPAFLETSAPRNLPFYERLGFTVTADVEVPEGPRTWCMTRKPGA

SEQ ID NO: 3269 - protein, 733 aa, Artificial Sequence
  Synthetic Polypeptide
MALPVTALLLPLALLLHAARPDDIVMTQSPDSLTVSLGERTTINCKSSQSVLDSSKNKNSLAWYQQKPGQPPKLLLSWASTRESGIPDRFSGSGSGTDFTLTIDSLQPEDSATYYCQQSAHFPITFGQGTRLEIKGGGGSGGGGSGGGGSQVQLVQSGAEVKKPGASVKVSCKASGYTFTNYGMNWVKQAPGQGLKWMGWINTYTGEPTYADDFKGRVTMTSDTSTSTAYLELHNLRSDDTAVYYCARWSWSDGYYVYFDYWGQGTTVTVSSTREQKLISEEDLAKPTTTPAPRPPTPAPTIASQPLSLRPEACRPAAGGAVHTRGLDFACDIYIWAPLAGTCGVLLLSLVITLYCKRGRKKLLYIFKQPFMRPVQTTQEEDGCSCRFPEEEEGGCELRVKFSRSADAPAYQQGQNQLYNELNLGRREEYDVLDKRRGRDPEMGGKPRRKNPQEGLYNELQKDKMAEAYSEIGMKGERRRGKGHDGLYQGLSTATKDTYDALHMQALPPRSSGSGEGRGSLLTCGDVEENPGPHMTEYKPTVRLATRDDVPRAVRTLAAAFADYPATRHTVDPDRHIERVTELQELFLTRVGLDIGKVWVADDGAAVAVWTTPESVEAGAVFAEIGPRMAELSGSRLAAQQQMEGLLAPHRPKEPAWFLATVGVSPDHQGKGLGSAVVLPGVEAAERAGVPAFLETSAPRNLPFYERLGFTVTADVEVPEGPRTWCMTRKPGA

SEQ ID NO: 3270 - protein, 729 aa, Artificial Sequence
  Synthetic Polypeptide
MALPVTALLLPLALLLHAARPDEIVLTQSPGSLAVSPGERVTMSCKSSQSVFFSSSQKNYLAWYQQIPGQSPRLLIYWASTRESGVPDRFTGSGSGTDFTLTISSVQPEDLAIYYCHQYLSSRTFGQGTKLEIKRGGGGSGGGGSGGGGSQVQLQQPGAEVVKPGASVKMSCKASGYTFTSYYIHWIKQTPGQGLEWVGVIYPGNDDISYNQKFQGKATLTADKSSTTAYMQLSSLTSEDSAVYYCAREVRLRYFDVWGQGTTVTVSSTREQKLISEEDLAKPTTTPAPRPPTPAPTIASQPLSLRPEACRPAAGGAVHTRGLDFACDIYIWAPLAGTCGVLLLSLVITLYCKRGRKKLLYIFKQPFMRPVQTTQEEDGCSCRFPEEEEGGCELRVKFSRSADAPAYQQGQNQLYNELNLGRREEYDVLDKRRGRDPEMGGKPRRKNPQEGLYNELQKDKMAEAYSEIGMKGERRRGKGHDGLYQGLSTATKDTYDALHMQALPPRSSGSGEGRGSLLTCGDVEENPGPHMTEYKPTVRLATRDDVPRAVRTLAAAFADYPATRHTVDPDRHIERVTELQELFLTRVGLDIGKVWVADDGAAVAVWTTPESVEAGAVFAEIGPRMAELSGSRLAAQQQMEGLLAPHRPKEPAWFLATVGVSPDHQGKGLGSAVVLPGVEAAERAGVPAFLETSAPRNLPFYERLGFTVTADVEVPEGPRTWCMTRKPGA

SEQ ID NO: 3271 - protein, 755 aa, Artificial Sequence
  Synthetic Polypeptide
MALPVTALLLPLALLLHAARPYINIYNAEPANPSEKNSPTQYAYGSGEFDIQLTQSPSSLSASVGDRVTITCRASQGISSVLAWYQQKPGKAPKLLIYDASSLESGVPSRFSGSGSGTDFTLTISSLQPEDFATYYCQQFNSSITFGQGTKLEIKRTVAAGGGGSGGGGSGGGGSQVQLVQSGAEVKKPGSSVKVSCKASGGTFSDYAISWVRQAPGQGLEWMGRIIPILGVANYAQKFQGRVTITADKSTRTAYMELSSLRSEDTAVYYCARNWADAFDIWGQGTMVTVSSASTREQKLISEEDLAKPTTTPAPRPPTPAPTIASQPLSLRPEACRPAAGGAVHTRGLDFACDIYIWAPLAGTCGVLLLSLVITLYCKRGRKKLLYIFKQPFMRPVQTTQEEDGCSCRFPEEEEGGCELRVKFSRSADAPAYQQGQNQLYNELNLGRREEYDVLDKRRGRDPEMGGKPRRKNPQEGLYNELQKDKMAEAYSEIGMKGERRRGKGHDGLYQGLSTATKDTYDALHMQALPPRSSGSGEGRGSLLTCGDVEENPGPHMTEYKPTVRLATRDDVPRAVRTLAAAFADYPATRHTVDPDRHIERVTELQELFLTRVGLDIGKVWVADDGAAVAVWTTPESVEAGAVFAEIGPRMAELSGSRLAAQQQMEGLLAPHRPKEPAWFLATVGVSPDHQGKGLGSAVVLPGVEAAERAGVPAFLETSAPRNLPFYERLGFTVTADVEVPEGPRTWCMTRKPGA

SEQ ID NO: 3272 - protein, 754 aa, Artificial Sequence
  Synthetic Polypeptide
MALPVTALLLPLALLLHAARPYINIYNAEPANPSEKNSPTQYAYGSGEFDIVMTQSPSSLSASLGGKVTITCKASQDINKYIAWYQHKPGKGPRLLIHYTSTLQPGIPSRFSGSGSGRDYSFSISNLEPEDIATYYCLQYDNLLTFGAGTKLELKRGGGGSGGGGSGGGGSEVKLQQSGPELVKPGTSVKVSCKASGYSFTDYNMYWVKQSHGKSLEWIGYIDPYKGGTIYNQKFKGKATLTVDKSSSTAFMHLNSLTSEDSAVYYCAREMITAYYFDYWGQGSSVTVSSLERTREQKLISEEDLAKPTTTPAPRPPTPAPTIASQPLSLRPEACRPAAGGAVHTRGLDFACDIYIWAPLAGTCGVLLLSLVITLYCKRGRKKLLYIFKQPFMRPVQTTQEEDGCSCRFPEEEEGGCELRVKFSRSADAPAYQQGQNQLYNELNLGRREEYDVLDKRRGRDPEMGGKPRRKNPQEGLYNELQKDKMAEAYSEIGMKGERRRGKGHDGLYQGLSTATKDTYDALHMQALPPRSSGSGEGRGSLLTCGDVEENPGPHMTEYKPTVRLATRDDVPRAVRTLAAAFADYPATRHTVDPDRHIERVTELQELFLTRVGLDIGKVWVADDGAAVAVWTTPESVEAGAVFAEIGPRMAELSGSRLAAQQQMEGLLAPHRPKEPAWFLATVGVSPDHQGKGLGSAVVLPGVEAAERAGVPAFLETSAPRNLPFYERLGFTVTADVEVPEGPRTWCMTRKPGA

SEQ ID NO: 3273 - protein, 770 aa, Artificial Sequence
  Synthetic Polypeptide
MALPVTALLLPLALLLHAARPDIQMTQSPSSLSASVGDRVTINCKASQDINSYLSWFQQKPGKAPKTLIYRANRLVDGVPSRFSGSGSGQDYTLTISSLQPEDFATYYCLQYDEFPLTFGGGTKVEIKGGGGSGGGGSGGGGSQVQLVQSGAEVKKPGASVKVSCKASGYTFTNYDINWVRQAPGQGLEWIGWIYPGDGSTKYNEKFKAKATLTADTSTSTAYMELRSLRSDDTAVYYCASGYEDAMDYWGQGTTVTVSSAKPTTTPAPRPPTPAPTIASQPLSLRPEACRPAAGGAVHTRGLDFACDITREQKLISEEDLAKPTTTPAPRPPTPAPTIASQPLSLRPEACRPAAGGAVHTRGLDFACDIYIWAPLAGTCGVLLLSLVITLYCKRGRKKLLYIFKQPFMRPVQTTQEEDGCSCRFPEEEEGGCELRVKFSRSADAPAYQQGQNQLYNELNLGRREEYDVLDKRRGRDPEMGGKPRRKNPQEGLYNELQKDKMAEAYSEIGMKGERRRGKGHDGLYQGLSTATKDTYDALHMQALPPRSSGSGEGRGSLLTCGDVEENPGPHMTEYKPTVRLATRDDVPRAVRTLAAAFADYPATRHTVDPDRHIERVTELQELFLTRVGLDIGKVWVADDGAAVAVWTTPESVEAGAVFAEIGPRMAELSGSRLAAQQQMEGLLAPHRPKEPAWFLATVGVSPDHQGKGLGSAVVLPGVEAAERAGVPAFLETSAPRNLPFYERLGFTVTADVEVPEGPRTWCMTRKPGA

SEQ ID NO: 3274 - protein, 726 aa, Artificial Sequence
  Synthetic Polypeptide
MALPVTALLLPLALLLHAARPEIVLTQSPLSLPVTPGEPASISCRSSQSLLHSNGYNYLDWYLQKPGQSPQLLIYLGVNSVSGVPDRFSGSGSGTDFTLKISRVEAEDVGVYYCMQALQTPWTFGQGTKVEIKGGGGSGGGGSGGGGSQVQLVQSGAEVKKPGSSVKVSCKASGGIFSNHAISWVRQAPGQGLEWMGGIIPIFGTANYAQKFQGRVTITADESTSTAFMELSSLRSEDTAVYYCAREWADVFDIWGQGTMVTVSSTREQKLISEEDLAKPTTTPAPRPPTPAPTIASQPLSLRPEACRPAAGGAVHTRGLDFACDIYIWAPLAGTCGVLLLSLVITLYCKRGRKKLLYIFKQPFMRPVQTTQEEDGCSCRFPEEEEGGCELRVKFSRSADAPAYQQGQNQLYNELNLGRREEYDVLDKRRGRDPEMGGKPRRKNPQEGLYNELQKDKMAEAYSEIGMKGERRRGKGHDGLYQGLSTATKDTYDALHMQALPPRSSGSGEGRGSLLTCGDVEENPGPHMTEYKPTVRLATRDDVPRAVRTLAAAFADYPATRHTVDPDRHIERVTELQELFLTRVGLDIGKVWVADDGAAVAVWTTPESVEAGAVFAEIGPRMAELSGSRLAAQQQMEGLLAPHRPKEPAWFLATVGVSPDHQGKGLGSAVVLPGVEAAERAGVPAFLETSAPRNLPFYERLGFTVTADVEVPEGPRTWCMTRKPGA

SEQ ID NO: 3275 - protein, 725 aa, Artificial Sequence
  Synthetic Polypeptide
MALPVTALLLPLALLLHAARPDIQMTQSPASLTVSLGQRATISCRASESVDSYGNSYLHWYQQKPGQPPQLLIYLASNLESGVPARFSGSGSRTDFTLTIDPVEADDAATYYCQQNNEDPWTFGGGTKVEIKGGGGSGGGGSGGGGSEVQLQQSGAELVKPGASVKMSCKAFGYTFTTFPIEWMKQSHGKSLEWIGNFHPYNDQTKYNEEFKGRAKLTIDRSSSTVYLELGRLTSDDSAVYYCARGYYYAFDFWGQGTTLTVSSTREQKLISEEDLAKPTTTPAPRPPTPAPTIASQPLSLRPEACRPAAGGAVHTRGLDFACDIYIWAPLAGTCGVLLLSLVITLYCKRGRKKLLYIFKQPFMRPVQTTQEEDGCSCRFPEEEEGGCELRVKFSRSADAPAYQQGQNQLYNELNLGRREEYDVLDKRRGRDPEMGGKPRRKNPQEGLYNELQKDKMAEAYSEIGMKGERRRGKGHDGLYQGLSTATKDTYDALHMQALPPRSSGSGEGRGSLLTCGDVEENPGPHMTEYKPTVRLATRDDVPRAVRTLAAAFADYPATRHTVDPDRHIERVTELQELFLTRVGLDIGKVWVADDGAAVAVWTTPESVEAGAVFAEIGPRMAELSGSRLAAQQQMEGLLAPHRPKEPAWFLATVGVSPDHQGKGLGSAVVLPGVEAAERAGVPAFLETSAPRNLPFYERLGFTVTADVEVPEGPRTWCMTRKPGA

SEQ ID NO: 3276 - protein, 722 aa, Artificial Sequence
  Synthetic Polypeptide
MALPVTALLLPLALLLHAARPDIQMTQSPSSLSASVGDRVTITCRASQGIRNDLGWYQQKPGKAPKRLIYAASSLQSGVPSRFSGSGSGTEFTLTISSLQPEDFATYYCLQHNSYPWTFGQGTKLEIKGGGGSGGGGSGGGGSEVQLVESGGALIQPGGSLRLSCVASGFTISGNYMSWVRQAPGKGLEWVSLIYSGDSTYYADSVKGRFTISRDISKNTVYLQMNSLRVEDTAVYYCVRDGYYVSDMVVWGKGTTVTVSSTREQKLISEEDLAKPTTTPAPRPPTPAPTIASQPLSLRPEACRPAAGGAVHTRGLDFACDIYIWAPLAGTCGVLLLSLVITLYCKRGRKKLLYIFKQPFMRPVQTTQEEDGCSCRFPEEEEGGCELRVKFSRSADAPAYQQGQNQLYNELNLGRREEYDVLDKRRGRDPEMGGKPRRKNPQEGLYNELQKDKMAEAYSEIGMKGERRRGKGHDGLYQGLSTATKDTYDALHMQALPPRSSGSGEGRGSLLTCGDVEENPGPHMTEYKPTVRLATRDDVPRAVRTLAAAFADYPATRHTVDPDRHIERVTELQELFLTRVGLDIGKVWVADDGAAVAVWTTPESVEAGAVFAEIGPRMAELSGSRLAAQQQMEGLLAPHRPKEPAWFLATVGVSPDHQGKGLGSAVVLPGVEAAERAGVPAFLETSAPRNLPFYERLGFTVTADVEVPEGPRTWCMTRKPGA

SEQ ID NO: 3277 - protein, 732 aa, Artificial Sequence
  Synthetic Polypeptide
MALPVTALLLPLALLLHAARPDVLLTQSPLSLPVTLGQPASISCRSSQTIVHSNGNTYLEWFQQRPGQSPRLLIYQVSNRFSGVPDRFSGSGSGTDFTLKISRVEAEDVGVYYCFQGSHVPRTFGGGTKVEIKRGGGGSGGGGSGGGGSQIQLVQSGSELKKPGASVKVSCKASGYTFTNYGMNWVRQAPGQGLKWMGWINTNTGEPKYAEEFKGRFALSLDTSVSTAYLQINSLKAEDTAVYFCARGYGNYARGAWLAYWGQGTLVTVSSTREQKLISEEDLAKPTTTPAPRPPTPAPTIASQPLSLRPEACRPAAGGAVHTRGLDFACDIYIWAPLAGTCGVLLLSLVITLYCKRGRKKLLYIFKQPFMRPVQTTQEEDGCSCRFPEEEEGGCELRVKFSRSADAPAYQQGQNQLYNELNLGRREEYDVLDKRRGRDPEMGGKPRRKNPQEGLYNELQKDKMAEAYSEIGMKGERRRGKGHDGLYQGLSTATKDTYDALHMQALPPRSSGSGEGRGSLLTCGDVEENPGPHMTEYKPTVRLATRDDVPRAVRTLAAAFADYPATRHTVDPDRHIERVTELQELFLTRVGLDIGKVWVADDGAAVAVWTTPESVEAGAVFAEIGPRMAELSGSRLAAQQQMEGLLAPHRPKEPAWFLATVGVSPDHQGKGLGSAVVLPGVEAAERAGVPAFLETSAPRNLPFYERLGFTVTADVEVPEGPRTWCMTRKPGA

SEQ ID NO: 3278 - protein, 719 aa, Artificial Sequence
  Synthetic Polypeptide
MALPVTALLLPLALLLHAARPDEIVLTQSPATLSLSPGERATLSCSASSSINYIYWLQQKPGQAPRILIYLTSNLASGVPARFSGSGSGTDFTLTISSLEPEDFAVYYCLQWSSNPLTFGGGTKVEIKGGGGSGGGGSGGGGSFEVQLVESGGGLVKPGGSLRLSCAASGFTFSSYDMSWVRQAPGKGLEWVSTISSGGSYTYYLDSIKGRFTISRDNAKNSLYLQMNSLRAEDTAVYYCARQGLDYWGRGTLVTVSSTREQKLISEEDLAKPTTTPAPRPPTPAPTIASQPLSLRPEACRPAAGGAVHTRGLDFACDIYIWAPLAGTCGVLLLSLVITLYCKRGRKKLLYIFKQPFMRPVQTTQEEDGCSCRFPEEEEGGCELRVKFSRSADAPAYQQGQNQLYNELNLGRREEYDVLDKRRGRDPEMGGKPRRKNPQEGLYNELQKDKMAEAYSEIGMKGERRRGKGHDGLYQGLSTATKDTYDALHMQALPPRSSGSGEGRGSLLTCGDVEENPGPHMTEYKPTVRLATRDDVPRAVRTLAAAFADYPATRHTVDPDRHIERVTELQELFLTRVGLDIGKVWVADDGAAVAVWTTPESVEAGAVFAEIGPRMAELSGSRLAAQQQMEGLLAPHRPKEPAWFLATVGVSPDHQGKGLGSAVVLPGVEAAERAGVPAFLETSAPRNLPFYERLGFTVTADVEVPEGPRTWCMTRKPGA

SEQ ID NO: 3279 - protein, 727 aa, Artificial Sequence
  Synthetic Polypeptide
MALPVTALLLPLALLLHAARPDIVMTQSPDSLAVSLGERATINCRASKSVSTSGYSFMHWYQQKPGQPPKLLIYLASNLESGVPDRFSGSGSGTDFTLTISSLQAEDVAVYYCQHSREVPWTFGQGTKVEIKRGGGGSGGGGSGGGGSQVQLVQSGAEVKKPGASVKVSCKASGYTFTNYGMNWVRQAPGQGLEWMGWINTYTGEPTYADAFKGRFAFSLDTSTSTAYLQINSLRSDDTAVYYCARDYGDYGMDYWGQGTTVTVSSTREQKLISEEDLAKPTTTPAPRPPTPAPTIASQPLSLRPEACRPAAGGAVHTRGLDFACDIYIWAPLAGTCGVLLLSLVITLYCKRGRKKLLYIFKQPFMRPVQTTQEEDGCSCRFPEEEEGGCELRVKFSRSADAPAYQQGQNQLYNELNLGRREEYDVLDKRRGRDPEMGGKPRRKNPQEGLYNELQKDKMAEAYSEIGMKGERRRGKGHDGLYQGLSTATKDTYDALHMQALPPRSSGSGEGRGSLLTCGDVEENPGPHMTEYKPTVRLATRDDVPRAVRTLAAAFADYPATRHTVDPDRHIERVTELQELFLTRVGLDIGKVWVADDGAAVAVWTTPESVEAGAVFAEIGPRMAELSGSRLAAQQQMEGLLAPHRPKEPAWFLATVGVSPDHQGKGLGSAVVLPGVEAAERAGVPAFLETSAPRNLPFYERLGFTVTADVEVPEGPRTWCMTRKPGA

SEQ ID NO: 3280 - protein, 723 aa, Artificial Sequence
  Synthetic Polypeptide
MALPVTALLLPLALLLHAARPDIVMTQTPLTLSVTIGQPASISCKSSQSLLDSDGKTYLNWLLQRPGQSPERLIYLVSKLDSGVPDRFTGSGSGTDFTLKISRVEAEDLGVYCCWQGTHFPYTFGGGTKVEIKGGGGGSGGGGSGGGGSQVQLQQPGAELVRPGASVKLSCKASGYTFTSYWMNWVKQRPGQGLEWIGMIDPSDSETHYNHIFKDKATLTVDKSSSTAYLQLSSLTSEDSAVYYCARNLYLWGQGTSVTVSSTREQKLISEEDLAKPTTTPAPRPPTPAPTIASQPLSLRPEACRPAAGGAVHTRGLDFACDIYIWAPLAGTCGVLLLSLVITLYCKRGRKKLLYIFKQPFMRPVQTTQEEDGCSCRFPEEEEGGCELRVKFSRSADAPAYQQGQNQLYNELNLGRREEYDVLDKRRGRDPEMGGKPRRKNPQEGLYNELQKDKMAEAYSEIGMKGERRRGKGHDGLYQGLSTATKDTYDALHMQALPPRSSGSGEGRGSLLTCGDVEENPGPHMTEYKPTVRLATRDDVPRAVRTLAAAFADYPATRHTVDPDRHIERVTELQELFLTRVGLDIGKVWVADDGAAVAVWTTPESVEAGAVFAEIGPRMAELSGSRLAAQQQMEGLLAPHRPKEPAWFLATVGVSPDHQGKGLGSAVVLPGVEAAERAGVPAFLETSAPRNLPFYERLGFTVTADVEVPEGPRTWCMTRKPGA

SEQ ID NO: 3281 - protein, 727 aa, Artificial Sequence
  Synthetic Polypeptide
MALPVTALLLPLALLLHAARPDDIQLTQSPSSLSASVGDRVTITCKASQSVDYEGDSFLNWYQQKPGKAPKLLIYAASNLESGVPSRFSGSGSGTDFTLTISSLQPEDFATYYCQQSNEDPLTFGQGTKVEIKRGGGGSGGGGSGGGGSEVQLVESGGGLVQPGGSLRLSCAASGYTFSSYWIEWVRQAPGKGLEWIGEILPGGGDTNYNEIFKGRATFSADTSKNTAYLQMNSLRAEDTAVYYCTRRVPIRLDYWGQGTLVTVSSTREQKLISEEDLAKPTTTPAPRPPTPAPTIASQPLSLRPEACRPAAGGAVHTRGLDFACDIYIWAPLAGTCGVLLLSLVITLYCKRGRKKLLYIFKQPFMRPVQTTQEEDGCSCRFPEEEEGGCELRVKFSRSADAPAYQQGQNQLYNELNLGRREEYDVLDKRRGRDPEMGGKPRRKNPQEGLYNELQKDKMAEAYSEIGMKGERRRGKGHDGLYQGLSTATKDTYDALHMQALPPRSSGSGEGRGSLLTCGDVEENPGPHMTEYKPTVRLATRDDVPRAVRTLAAAFADYPATRHTVDPDRHIERVTELQELFLTRVGLDIGKVWVADDGAAVAVWTTPESVEAGAVFAEIGPRMAELSGSRLAAQQQMEGLLAPHRPKEPAWFLATVGVSPDHQGKGLGSAVVLPGVEAAERAGVPAFLETSAPRNLPFYERLGFTVTADVEVPEGPRTWCMTRKPGA

SEQ ID NO: 3282 - protein, 723 aa, Artificial Sequence
  Synthetic Polypeptide
MALPVTALLLPLALLLHAARPDIVMTQTPLSLSVTPGQPASISCKSSQSLLDGDGKTYLNWLLQKPGQSPQRLIYLVSKLDSGVPDRFSGSGSGTDFTLKISRVEAEDVGVYYCWQGTHFPRTFGQGTKLEIKGGGGSGGGGSGGGGSQVQLVQSGAEVKKPGASVKVSCKASGYTFKDTYIHWVRQAPGQGLEWMGRIDPANGNTKYDPKFQGRVTMTRDTSISTAYMELSRLRSDDTAVYYCARRGGVDWGQGTLVTVSSTREQKLISEEDLAKPTTTPAPRPPTPAPTIASQPLSLRPEACRPAAGGAVHTRGLDFACDIYIWAPLAGTCGVLLLSLVITLYCKRGRKKLLYIFKQPFMRPVQTTQEEDGCSCRFPEEEEGGCELRVKFSRSADAPAYQQGQNQLYNELNLGRREEYDVLDKRRGRDPEMGGKPRRKNPQEGLYNELQKDKMAEAYSEIGMKGERRRGKGHDGLYQGLSTATKDTYDALHMQALPPRSSGSGEGRGSLLTCGDVEENPGPHMTEYKPTVRLATRDDVPRAVRTLAAAFADYPATRHTVDPDRHIERVTELQELFLTRVGLDIGKVWVADDGAAVAVWTTPESVEAGAVFAEIGPRMAELSGSRLAAQQQMEGLLAPHRPKEPAWFLATVGVSPDHQGKGLGSAVVLPGVEAAERAGVPAFLETSAPRNLPFYERLGFTVTADVEVPEGPRTWCMTRKPGA

SEQ ID NO: 3283 - protein, 731 aa, Artificial Sequence
  Synthetic Polypeptide
MALPVTALLLPLALLLHAARPDIVMTQSPDSLAVSLGERATINCESSQSLLNSGNQKNYLTWYQQKPGQPPKPLIYWASTRESGVPDRFSGSGSGTDFTLTISSLQAEDVAVYYCQNDYSYPYTFGQGTKLEIKRGGGGSGGGGSGGGGSEVQLVQSGAEVKKPGESLKISCKGSGYSFTDYYMKWARQMPGKGLEWMGDIIPSNGATFYNQKFKGQVTISADKSISTTYLQWSSLKASDTAMYYCARSHLLRASWFAYWGQGTMVTVSSTREQKLISEEDLAKPTTTPAPRPPTPAPTIASQPLSLRPEACRPAAGGAVHTRGLDFACDIYIWAPLAGTCGVLLLSLVITLYCKRGRKKLLYIFKQPFMRPVQTTQEEDGCSCRFPEEEEGGCELRVKFSRSADAPAYQQGQNQLYNELNLGRREEYDVLDKRRGRDPEMGGKPRRKNPQEGLYNELQKDKMAEAYSEIGMKGERRRGKGHDGLYQGLSTATKDTYDALHMQALPPRSSGSGEGRGSLLTCGDVEENPGPHMTEYKPTVRLATRDDVPRAVRTLAAAFADYPATRHTVDPDRHIERVTELQELFLTRVGLDIGKVWVADDGAAVAVWTTPESVEAGAVFAEIGPRMAELSGSRLAAQQQMEGLLAPHRPKEPAWFLATVGVSPDHQGKGLGSAVVLPGVEAAERAGVPAFLETSAPRNLPFYERLGFTVTADVEVPEGPRTWCMTRKPGA

SEQ ID NO: 3284 - protein, 726 aa, Artificial Sequence
  Synthetic Polypeptide
MALPVTALLLPLALLLHAARPDIVLTQSPASLAVSLGQRATISCRASESVDNYGNTFMHWYQQKPGQPPKLLIYRASNLESGIPARFSGSGSRTDFTLTINPVEADDVATYYCQQSNEDPPTFGAGTKLELKGGGGSGGGGSGGGGSQIQLVQSGPELKKPGETVKISCKASGYIFTNYGMNWVKQAPGKSFKWMGWINTYTGESTYSADFKGRFAFSLETSASTAYLHINDLKNEDTATYFCARSGGYDPMDYWGQGTSVTVSSTREQKLISEEDLAKPTTTPAPRPPTPAPTIASQPLSLRPEACRPAAGGAVHTRGLDFACDIYIWAPLAGTCGVLLLSLVITLYCKRGRKKLLYIFKQPFMRPVQTTQEEDGCSCRFPEEEEGGCELRVKFSRSADAPAYQQGQNQLYNELNLGRREEYDVLDKRRGRDPEMGGKPRRKNPQEGLYNELQKDKMAEAYSEIGMKGERRRGKGHDGLYQGLSTATKDTYDALHMQALPPRSSGSGEGRGSLLTCGDVEENPGPHMTEYKPTVRLATRDDVPRAVRTLAAAFADYPATRHTVDPDRHIERVTELQELFLTRVGLDIGKVWVADDGAAVAVWTTPESVEAGAVFAEIGPRMAELSGSRLAAQQQMEGLLAPHRPKEPAWFLATVGVSPDHQGKGLGSAVVLPGVEAAERAGVPAFLETSAPRNLPFYERLGFTVTADVEVPEGPRTWCMTRKPGA

SEQ ID NO: 3285 - protein, 730 aa, Artificial Sequence
  Synthetic Polypeptide
MALPVTALLLPLALLLHAARPDFVMTQSPDSLAVSLGERVTMSCKSSQSLLNSGNQKNYLTWYQQKPGQPPKLLIYWASTRESGVPDRFSGSGSGTDFTLTISSLQAEDVAVYYCQNDYSYPYTFGQGTKLEIKGGGGSGGGGSGGGGSEVQLVQSGAELKKPGASVKVSCKASGYTFTDYYMKWVRQAPGQGLEWIGDIIPSNGATFYNQKFKGRVTITVDKSTSTAYMELSSLRSEDTAVYYCARSHLLRASWFAYWGQGTLVTVSSTREQKLISEEDLAKPTTTPAPRPPTPAPTIASQPLSLRPEACRPAAGGAVHTRGLDFACDIYIWAPLAGTCGVLLLSLVITLYCKRGRKKLLYIFKQPFMRPVQTTQEEDGCSCRFPEEEEGGCELRVKFSRSADAPAYQQGQNQLYNELNLGRREEYDVLDKRRGRDPEMGGKPRRKNPQEGLYNELQKDKMAEAYSEIGMKGERRRGKGHDGLYQGLSTATKDTYDALHMQALPPRSSGSGEGRGSLLTCGDVEENPGPHMTEYKPTVRLATRDDVPRAVRTLAAAFADYPATRHTVDPDRHIERVTELQELFLTRVGLDIGKVWVADDGAAVAVWTTPESVEAGAVFAEIGPRMAELSGSRLAAQQQMEGLLAPHRPKEPAWFLATVGVSPDHQGKGLGSAVVLPGVEAAERAGVPAFLETSAPRNLPFYERLGFTVTADVEVPEGPRTWCMTRKPGA

SEQ ID NO: 3286 - protein, 730 aa, Artificial Sequence
  Synthetic Polypeptide
MALPVTALLLPLALLLHAARPDFVMTQSPDSLAVSLGERVTMSCKSSQSLLNSGNQKNYLTWYQQKPGQPPKLLIYWASTRESGVPDRFSGSGSGTDFTLTISSLQAEDVAVYYCQNDYSYPYTFGQGTKLEIKGGGGSGGGGSGGGGSQVQLVQSGAELKKPGASVKVSCKASGYTFTDYYMKWVRQAPGQGLEWIGDIIPSNGATFYNQKFKGRVTITVDKSTSTAYMELSSLRSEDTAVYYCARSHLLRASWFAYWGQGTLVTVSSTREQKLISEEDLAKPTTTPAPRPPTPAPTIASQPLSLRPEACRPAAGGAVHTRGLDFACDIYIWAPLAGTCGVLLLSLVITLYCKRGRKKLLYIFKQPFMRPVQTTQEEDGCSCRFPEEEEGGCELRVKFSRSADAPAYQQGQNQLYNELNLGRREEYDVLDKRRGRDPEMGGKPRRKNPQEGLYNELQKDKMAEAYSEIGMKGERRRGKGHDGLYQGLSTATKDTYDALHMQALPPRSSGSGEGRGSLLTCGDVEENPGPHMTEYKPTVRLATRDDVPRAVRTLAAAFADYPATRHTVDPDRHIERVTELQELFLTRVGLDIGKVWVADDGAAVAVWTTPESVEAGAVFAEIGPRMAELSGSRLAAQQQMEGLLAPHRPKEPAWFLATVGVSPDHQGKGLGSAVVLPGVEAAERAGVPAFLETSAPRNLPFYERLGFTVTADVEVPEGPRTWCMTRKPGA

SEQ ID NO: 3287 - protein, 724 aa, Artificial Sequence
  Synthetic Polypeptide
MALPVTALLLPLALLLHAARPEIVLTQSPGTLSLSPGERATLSCRASQSVSSSYLAWYQQKPGQAPRLLIYGASSRATGIPDRFSGSGSGTDFTLTISRLEPEDFAVYYCQQDYGFPWTFGQGTKVEIKRGGGGSGGGGSGGGGSEVQLVQSGAEVKKPGESLKISCKGSGYSFTSYWISWVRQMPGKGLEWMGIIDPSDSDTRYSPSFQGQVTISADKSISTAYLQWSSLKASDTAMYYCARGDGSTDLDYWGQGTLVTVSSTREQKLISEEDLAKPTTTPAPRPPTPAPTIASQPLSLRPEACRPAAGGAVHTRGLDFACDIYIWAPLAGTCGVLLLSLVITLYCKRGRKKLLYIFKQPFMRPVQTTQEEDGCSCRFPEEEEGGCELRVKFSRSADAPAYQQGQNQLYNELNLGRREEYDVLDKRRGRDPEMGGKPRRKNPQEGLYNELQKDKMAEAYSEIGMKGERRRGKGHDGLYQGLSTATKDTYDALHMQALPPRSSGSGEGRGSLLTCGDVEENPGPHMTEYKPTVRLATRDDVPRAVRTLAAAFADYPATRHTVDPDRHIERVTELQELFLTRVGLDIGKVWVADDGAAVAVWTTPESVEAGAVFAEIGPRMAELSGSRLAAQQQMEGLLAPHRPKEPAWFLATVGVSPDHQGKGLGSAVVLPGVEAAERAGVPAFLETSAPRNLPFYERLGFTVTADVEVPEGPRTWCMTRKPGA

SEQ ID NO: 3288 - protein, 726 aa, Artificial Sequence
  Synthetic Polypeptide
MALPVTALLLPLALLLHAARPQFVLTQPPSVSTNPGSTVKLSCKRNTGNIGSNYVNWYQQKPGQSPTTMIYRDDKRPDGVPDRFSGSIDRSSNSALLTINNVQTEDEADYFCQSYSSGINIIFGGGTKLTVLGGGGSGGGGSGGGGSQVQLQESGPGLVKPSETLSLTCTVSGFSLTTYDVHWVRQPPGKGLEWMGRIQNAGITDYNSALKSRLIISRDTSKSQVFLKMNSVTTADTAMYFCAKTGSYFYAFDHWGQGTLVTVSSTREQKLISEEDLAKPTTTPAPRPPTPAPTIASQPLSLRPEACRPAAGGAVHTRGLDFACDIYIWAPLAGTCGVLLLSLVITLYCKRGRKKLLYIFKQPFMRPVQTTQEEDGCSCRFPEEEEGGCELRVKFSRSADAPAYQQGQNQLYNELNLGRREEYDVLDKRRGRDPEMGGKPRRKNPQEGLYNELQKDKMAEAYSEIGMKGERRRGKGHDGLYQGLSTATKDTYDALHMQALPPRSSGSGEGRGSLLTCGDVEENPGPHMTEYKPTVRLATRDDVPRAVRTLAAAFADYPATRHTVDPDRHIERVTELQELFLTRVGLDIGKVWVADDGAAVAVWTTPESVEAGAVFAEIGPRMAELSGSRLAAQQQMEGLLAPHRPKEPAWFLATVGVSPDHQGKGLGSAVVLPGVEAAERAGVPAFLETSAPRNLPFYERLGFTVTADVEVPEGPRTWCMTRKPGA

SEQ ID NO: 3289 - protein, 723 aa, Artificial Sequence
  Synthetic Polypeptide
MALPVTALLLPLALLLHAARPDIQMTQSPASLSASLGETVTIECRPSEDIHSNVAWYQQKPGNSPQLLIYDASNLADGVPSRFSGSGSGTQYSLKINSLQSEDVASYFCHQYNIYPYTFGSGTKLELKGGGGSGGGGSGGGGSQVQLQESGPTLVKPGDSVKMSCKASGYTFTDYIIHWVKQSHGKSLEWIGYINPYSDGTNYNEKFKSKATLTVDKSTSTAYMEFSRLTSEDSAIYFCALNYGSYYAMDAWGQGTSVTVSSTREQKLISEEDLAKPTTTPAPRPPTPAPTIASQPLSLRPEACRPAAGGAVHTRGLDFACDIYIWAPLAGTCGVLLLSLVITLYCKRGRKKLLYIFKQPFMRPVQTTQEEDGCSCRFPEEEEGGCELRVKFSRSADAPAYQQGQNQLYNELNLGRREEYDVLDKRRGRDPEMGGKPRRKNPQEGLYNELQKDKMAEAYSEIGMKGERRRGKGHDGLYQGLSTATKDTYDALHMQALPPRSSGSGEGRGSLLTCGDVEENPGPHMTEYKPTVRLATRDDVPRAVRTLAAAFADYPATRHTVDPDRHIERVTELQELFLTRVGLDIGKVWVADDGAAVAVWTTPESVEAGAVFAEIGPRMAELSGSRLAAQQQMEGLLAPHRPKEPAWFLATVGVSPDHQGKGLGSAVVLPGVEAAERAGVPAFLETSAPRNLPFYERLGFTVTADVEVPEGPRTWCMTRKPGA

SEQ ID NO: 3290 - protein, 724 aa, Artificial Sequence
  Synthetic Polypeptide
MALPVTALLLPLALLLHAARPEIVLTQSPATLSLSPGERATLSCRASQSVSSYLAWYQQKPGQAPRLLIYDASNRATGIPARFSGSGSGTDFTLTISSLEPEDFAVYYCQQRSNWPLTFGQGTKVEIKRGGGGSGGGGSGGGGSEVQLLESGGGLVQPGGSLRLSCAASGFTFSGYWMHWVRQAPGKGLEWVSAIRSDGSSKYYADSVKGRFTISRDNSKNTLYLQMNSLRAEDTAVYYCAKDGVIEDTFDYWGQGTLVTVSSTREQKLISEEDLAKPTTTPAPRPPTPAPTIASQPLSLRPEACRPAAGGAVHTRGLDFACDIYIWAPLAGTCGVLLLSLVITLYCKRGRKKLLYIFKQPFMRPVQTTQEEDGCSCRFPEEEEGGCELRVKFSRSADAPAYQQGQNQLYNELNLGRREEYDVLDKRRGRDPEMGGKPRRKNPQEGLYNELQKDKMAEAYSEIGMKGERRRGKGHDGLYQGLSTATKDTYDALHMQALPPRSSGSGEGRGSLLTCGDVEENPGPHMTEYKPTVRLATRDDVPRAVRTLAAAFADYPATRHTVDPDRHIERVTELQELFLTRVGLDIGKVWVADDGAAVAVWTTPESVEAGAVFAEIGPRMAELSGSRLAAQQQMEGLLAPHRPKEPAWFLATVGVSPDHQGKGLGSAVVLPGVEAAERAGVPAFLETSAPRNLPFYERLGFTVTADVEVPEGPRTWCMTRKPGA

SEQ ID NO: 3291 - protein, 720 aa, Artificial Sequence
  Synthetic Polypeptide
MALPVTALLLPLALLLHAARPDVQITQSPSYLAASPGETITINCRASKSISKDLAWYQEKPGKTNKLLIYSGSTLQSGIPSRFSGSGSGTDFTLTISSLEPEDFAMYYCQQHNKYPYTFGGGTKLEIKRGGGGSGGGGSGGGGSQVQLQQPGAELVRPGASVKLSCKASGYTFTSYWMNWVKQRPDQGLEWIGRIDPYDSETHYNQKFKDKAILTVDKSSSTAYMQLSSLTSEDSAVYYCARGNWDDYWGQGTTLTVSSTREQKLISEEDLAKPTTTPAPRPPTPAPTIASQPLSLRPEACRPAAGGAVHTRGLDFACDIYIWAPLAGTCGVLLLSLVITLYCKRGRKKLLYIFKQPFMRPVQTTQEEDGCSCRFPEEEEGGCELRVKFSRSADAPAYQQGQNQLYNELNLGRREEYDVLDKRRGRDPEMGGKPRRKNPQEGLYNELQKDKMAEAYSEIGMKGERRRGKGHDGLYQGLSTATKDTYDALHMQALPPRSSGSGEGRGSLLTCGDVEENPGPHMTEYKPTVRLATRDDVPRAVRTLAAAFADYPATRHTVDPDRHIERVTELQELFLTRVGLDIGKVWVADDGAAVAVWTTPESVEAGAVFAEIGPRMAELSGSRLAAQQQMEGLLAPHRPKEPAWFLATVGVSPDHQGKGLGSAVVLPGVEAAERAGVPAFLETSAPRNLPFYERLGFTVTADVEVPEGPRTWCMTRKPGA

SEQ ID NO: 3292 - protein, 751 aa, Artificial Sequence
  Synthetic Polypeptide
MALPVTALLLPLALLLHAARPYINIYNAEPANPSEKNSPTQYAYGSGEFDIQMTQSPASLSASLGETVTIECRTSKDIYSNLAWFQQEPGNSPQLLIYDASNLADGVPSRFSGSGSGTQYSLQINNLQSEDVASYFCHQYNNYPYTFGTGTKLELKGGGGSGGGGSGGGGSQVQLQESGPTLVNPGDSVKMSCKASGYTFTDHIIHWVKQSHGKSLEWIGYINPYSGGANYNGKFKSKATLTIDKSSSTAYMEFSRLTSGDSAIYYCALNYGSYYAMDAWGQGTSVTVSSTREQKLISEEDLAKPTTTPAPRPPTPAPTIASQPLSLRPEACRPAAGGAVHTRGLDFACDIYIWAPLAGTCGVLLLSLVITLYCKRGRKKLLYIFKQPFMRPVQTTQEEDGCSCRFPEEEEGGCELRVKFSRSADAPAYQQGQNQLYNELNLGRREEYDVLDKRRGRDPEMGGKPRRKNPQEGLYNELQKDKMAEAYSEIGMKGERRRGKGHDGLYQGLSTATKDTYDALHMQALPPRSSGSGEGRGSLLTCGDVEENPGPHMTEYKPTVRLATRDDVPRAVRTLAAAFADYPATRHTVDPDRHIERVTELQELFLTRVGLDIGKVWVADDGAAVAVWTTPESVEAGAVFAEIGPRMAELSGSRLAAQQQMEGLLAPHRPKEPAWFLATVGVSPDHQGKGLGSAVVLPGVEAAERAGVPAFLETSAPRNLPFYERLGFTVTADVEVPEGPRTWCMTRKPGA

SEQ ID NO: 3293 - protein, 722 aa, Artificial Sequence
  Synthetic Polypeptide
MALPVTALLLPLALLLHAARPEIVLTQSPTSMTASPGEQVTITCRASSSINYMHWYQQKPGASPRPWIYETSKLASGVPDRFSGSASGTSYSLTINNMEAEDAATYYCQQWNYPSWTFGGGTKLELKGGGGSGGGGSGGGGSEVQLVESGGGLVQPGRSLKLSCAASGFTFSDYNMAWVRQAPKKGLEWVATILYDGGRTYYRGSVKGRFTISRDNAKSTLYLRMDSLRSEDTATYYCATHSRGTDYFDYWGQGVMVTVSSTREQKLISEEDLAKPTTTPAPRPPTPAPTIASQPLSLRPEACRPAAGGAVHTRGLDFACDIYIWAPLAGTCGVLLLSLVITLYCKRGRKKLLYIFKQPFMRPVQTTQEEDGCSCRFPEEEEGGCELRVKFSRSADAPAYQQGQNQLYNELNLGRREEYDVLDKRRGRDPEMGGKPRRKNPQEGLYNELQKDKMAEAYSEIGMKGERRRGKGHDGLYQGLSTATKDTYDALHMQALPPRSSGSGEGRGSLLTCGDVEENPGPHMTEYKPTVRLATRDDVPRAVRTLAAAFADYPATRHTVDPDRHIERVTELQELFLTRVGLDIGKVWVADDGAAVAVWTTPESVEAGAVFAEIGPRMAELSGSRLAAQQQMEGLLAPHRPKEPAWFLATVGVSPDHQGKGLGSAVVLPGVEAAERAGVPAFLETSAPRNLPFYERLGFTVTADVEVPEGPRTWCMTRKPGA

SEQ ID NO: 3294 - protein, 731 aa, Artificial Sequence
  Synthetic Polypeptide
MALPVTALLLPLALLLHAARPDIVMTQSPSSLAVSEGETVTINCKSSQSFLSSGDGKNYVAWYQYKPGQSPKLLIYWASTRQSGVPDRFIGSGSGTDFTLTISTVQAEDLAIYYCQQYYDTPLTFGSGTKLEIKGGGGSGGGGSGGGGSEVKLQESGPSLVQSSQTLSLTCTVSGFSLTSYHIHWVRQTPGKGLEWMGVMWSDGDTSYNSALKSRLSISRDTSQSQVFLKMNSLQTEDTATYYCARGYYSSYLYLWFAYWGQGTLVTVSSTREQKLISEEDLAKPTTTPAPRPPTPAPTIASQPLSLRPEACRPAAGGAVHTRGLDFACDIYIWAPLAGTCGVLLLSLVITLYCKRGRKKLLYIFKQPFMRPVQTTQEEDGCSCRFPEEEEGGCELRVKFSRSADAPAYQQGQNQLYNELNLGRREEYDVLDKRRGRDPEMGGKPRRKNPQEGLYNELQKDKMAEAYSEIGMKGERRRGKGHDGLYQGLSTATKDTYDALHMQALPPRSSGSGEGRGSLLTCGDVEENPGPHMTEYKPTVRLATRDDVPRAVRTLAAAFADYPATRHTVDPDRHIERVTELQELFLTRVGLDIGKVWVADDGAAVAVWTTPESVEAGAVFAEIGPRMAELSGSRLAAQQQMEGLLAPHRPKEPAWFLATVGVSPDHQGKGLGSAVVLPGVEAAERAGVPAFLETSAPRNLPFYERLGFTVTADVEVPEGPRTWCMTRKPGA

SEQ ID NO: 3295 - protein, 735 aa, Artificial Sequence
  Synthetic Polypeptide
MALPVTALLLPLALLLHAARPDVLMTQTPVSLPVSLGGQVSISCRSSQSLVHSDGDTYLHWYLQKPGQSPQLLIYRVSNRFSGVPDRFSGSGSGTDFTLKISRVEPEDLGLYYCLQTTHFPPWTFGGGTKLEMKGGGGSGGGGSGGGGSQVQLQQSGPELRRPGSSVRLSCKASGYRIKDFLIHWIKNRPEHGLEWIGWIDPEDGETKYAQKFQTKATLTADTSSNTAYMQLSSLTSEDTATYFCARWGDVYYGLMRGHVMDAWGQGTSVTVSSTREQKLISEEDLAKPTTTPAPRPPTPAPTIASQPLSLRPEACRPAAGGAVHTRGLDFACDIYIWAPLAGTCGVLLLSLVITLYCKRGRKKLLYIFKQPFMRPVQTTQEEDGCSCRFPEEEEGGCELRVKFSRSADAPAYQQGQNQLYNELNLGRREEYDVLDKRRGRDPEMGGKPRRKNPQEGLYNELQKDKMAEAYSEIGMKGERRRGKGHDGLYQGLSTATKDTYDALHMQALPPRSSGSGEGRGSLLTCGDVEENPGPHMTEYKPTVRLATRDDVPRAVRTLAAAFADYPATRHTVDPDRHIERVTELQELFLTRVGLDIGKVWVADDGAAVAVWTTPESVEAGAVFAEIGPRMAELSGSRLAAQQQMEGLLAPHRPKEPAWFLATVGVSPDHQGKGLGSAVVLPGVEAAERAGVPAFLETSAPRNLPFYERLGFTVTADVEVPEGPRTWCMTRKPGA

SEQ ID NO: 3296 - protein, 726 aa, Artificial Sequence
  Synthetic Polypeptide
MALPVTALLLPLALLLHAARPDIQMTQSTSSLSASLGDRVTISCSASQGINNYLNWYQQKPDGTVELLIYYTSTLQSGVPSRFSGSGSGTDYSLTISNLEPEDIGTYYCQQYSKLPRTFGGGTKLEIKGGGGSGGGGSGGGGSQVQLQQSGSELMMPGASVKISCKATGYTFSNYWIEWVKQRPGHGLEWIGEILPGTGRTIYNEKFKGKATFTADISSNTVQMQLSSLTSEDSAVYYCARRDYYGNFYYAMDYWGQGTSVTVSSTREQKLISEEDLAKPTTTPAPRPPTPAPTIASQPLSLRPEACRPAAGGAVHTRGLDFACDIYIWAPLAGTCGVLLLSLVITLYCKRGRKKLLYIFKQPFMRPVQTTQEEDGCSCRFPEEEEGGCELRVKFSRSADAPAYQQGQNQLYNELNLGRREEYDVLDKRRGRDPEMGGKPRRKNPQEGLYNELQKDKMAEAYSEIGMKGERRRGKGHDGLYQGLSTATKDTYDALHMQALPPRSSGSGEGRGSLLTCGDVEENPGPHMTEYKPTVRLATRDDVPRAVRTLAAAFADYPATRHTVDPDRHIERVTELQELFLTRVGLDIGKVWVADDGAAVAVWTTPESVEAGAVFAEIGPRMAELSGSRLAAQQQMEGLLAPHRPKEPAWFLATVGVSPDHQGKGLGSAVVLPGVEAAERAGVPAFLETSAPRNLPFYERLGFTVTADVEVPEGPRTWCMTRKPGA

SEQ ID NO: 3297 - protein, 721 aa, Artificial Sequence
  Synthetic Polypeptide
MALPVTALLLPLALLLHAARPDIQMTQSPASLSVSVGETVTITCRASENIYSNLAWYQQKQGKSPQLLVYAATNLADGVPSRFSGSGSGTQYSLKINSLQSEDFGSYYCQHFWGTWTFGGGTTLEIKGGGGSGGGGSGGGGSEVQLQQSGPELVKPGASVKMSCKASGYTFTDYYMKWMKQSHGKSLEWIGDINPNNGGTTYNQKFKGKATLTVDKSSSTAYMQLNSLTSEDSAVYYCARDYGYGYFDYWGQGTTLTVSSTREQKLISEEDLAKPTTTPAPRPPTPAPTIASQPLSLRPEACRPAAGGAVHTRGLDFACDIYIWAPLAGTCGVLLLSLVITLYCKRGRKKLLYIFKQPFMRPVQTTQEEDGCSCRFPEEEEGGCELRVKFSRSADAPAYQQGQNQLYNELNLGRREEYDVLDKRRGRDPEMGGKPRRKNPQEGLYNELQKDKMAEAYSEIGMKGERRRGKGHDGLYQGLSTATKDTYDALHMQALPPRSSGSGEGRGSLLTCGDVEENPGPHMTEYKPTVRLATRDDVPRAVRTLAAAFADYPATRHTVDPDRHIERVTELQELFLTRVGLDIGKVWVADDGAAVAVWTTPESVEAGAVFAEIGPRMAELSGSRLAAQQQMEGLLAPHRPKEPAWFLATVGVSPDHQGKGLGSAVVLPGVEAAERAGVPAFLETSAPRNLPFYERLGFTVTADVEVPEGPRTWCMTRKPGA

SEQ ID NO: 3298 - protein, 724 aa, Artificial Sequence
  Synthetic Polypeptide
MALPVTALLLPLALLLHAARPEIVLTQSPGTLSLSPGERATLSCRASQSVGGYLAWYQQKPGQAPRLLIYDASNRATGIPARFSGSGSGTDFTLTISSLEPEDFAVYYCQQRNNWPPMYTFGQGTKLEIKRGGGGSGGGGSGGGGSQVQLVQSGAEVKKPGSSVKVSCKASGGTFSSYAISWVRQAPGQGLEWMGGIIPILGTANYAQKFQGRVTITADESTSTAYMELSSLRSEDTAVYYCARWGGGAFDIWGQGTMVTVSSTREQKLISEEDLAKPTTTPAPRPPTPAPTIASQPLSLRPEACRPAAGGAVHTRGLDFACDIYIWAPLAGTCGVLLLSLVITLYCKRGRKKLLYIFKQPFMRPVQTTQEEDGCSCRFPEEEEGGCELRVKFSRSADAPAYQQGQNQLYNELNLGRREEYDVLDKRRGRDPEMGGKPRRKNPQEGLYNELQKDKMAEAYSEIGMKGERRRGKGHDGLYQGLSTATKDTYDALHMQALPPRSSGSGEGRGSLLTCGDVEENPGPHMTEYKPTVRLATRDDVPRAVRTLAAAFADYPATRHTVDPDRHIERVTELQELFLTRVGLDIGKVWVADDGAAVAVWTTPESVEAGAVFAEIGPRMAELSGSRLAAQQQMEGLLAPHRPKEPAWFLATVGVSPDHQGKGLGSAVVLPGVEAAERAGVPAFLETSAPRNLPFYERLGFTVTADVEVPEGPRTWCMTRKPGA

SEQ ID NO: 3299 - protein, 719 aa, Artificial Sequence
  Synthetic Polypeptide
MALPVTALLLPLALLLHAARPQIVLTQSPALMSASPGEKVTMTCSASSSVRYMYWYQQKPRSSPKPWIHLTSNLASGVPARFSGSGSGTSYSLTISSMEAEDAATYYCQQWSSHPFTFGSGTKLEIKGGGGSGGGGSGGGGSDVQLQESGPGLVKPSQSLSLTCTVTGFSITSDYSWNWIRQFPGNKLEWMGYISYSGHTSYNPSLESRISITRDTSKNQFFLQLNSVTTEDTATYYCTRGNWDVVYWGQGTLVTVSATREQKLISEEDLAKPTTTPAPRPPTPAPTIASQPLSLRPEACRPAAGGAVHTRGLDFACDIYIWAPLAGTCGVLLLSLVITLYCKRGRKKLLYIFKQPFMRPVQTTQEEDGCSCRFPEEEEGGCELRVKFSRSADAPAYQQGQNQLYNELNLGRREEYDVLDKRRGRDPEMGGKPRRKNPQEGLYNELQKDKMAEAYSEIGMKGERRRGKGHDGLYQGLSTATKDTYDALHMQALPPRSSGSGEGRGSLLTCGDVEENPGPHMTEYKPTVRLATRDDVPRAVRTLAAAFADYPATRHTVDPDRHIERVTELQELFLTRVGLDIGKVWVADDGAAVAVWTTPESVEAGAVFAEIGPRMAELSGSRLAAQQQMEGLLAPHRPKEPAWFLATVGVSPDHQGKGLGSAVVLPGVEAAERAGVPAFLETSAPRNLPFYERLGFTVTADVEVPEGPRTWCMTRKPGA

SEQ ID NO: 3300 - protein, 729 aa, Artificial Sequence
  Synthetic Polypeptide
MALPVTALLLPLALLLHAARPDVVMTQSPLSLPVTLGQPASISCRSSQSIVHSDGNTYLEWYQQRPGQSPRRLIYKVSNRFSGVPDRFSGSGSGTDFTLKISRVEAEDVGVYYCFQGSHAPWTFGGGTKVEIKGGGGSGGGGSGGGGSEVQLVESGGGLVQPGGSLRLSCAASGFTFSSYGMHWVRQAPGKGLEWVAYITTRSSTIYYADSVKGRFTISRDNAKNSLYLQMNSLRAEDTAVYYCTREPLTGYYAMDYWGQGTSVTVSSTREQKLISEEDLAKPTTTPAPRPPTPAPTIASQPLSLRPEACRPAAGGAVHTRGLDFACDIYIWAPLAGTCGVLLLSLVITLYCKRGRKKLLYIFKQPFMRPVQTTQEEDGCSCRFPEEEEGGCELRVKFSRSADAPAYQQGQNQLYNELNLGRREEYDVLDKRRGRDPEMGGKPRRKNPQEGLYNELQKDKMAEAYSEIGMKGERRRGKGHDGLYQGLSTATKDTYDALHMQALPPRSSGSGEGRGSLLTCGDVEENPGPHMTEYKPTVRLATRDDVPRAVRTLAAAFADYPATRHTVDPDRHIERVTELQELFLTRVGLDIGKVWVADDGAAVAVWTTPESVEAGAVFAEIGPRMAELSGSRLAAQQQMEGLLAPHRPKEPAWFLATVGVSPDHQGKGLGSAVVLPGVEAAERAGVPAFLETSAPRNLPFYERLGFTVTADVEVPEGPRTWCMTRKPGA

SEQ ID NO: 3301 - protein, 721 aa, Artificial Sequence
  Synthetic Polypeptide
MALPVTALLLPLALLLHAARPDIQMTQSPSSLSASVGDRVTITCRASQSISLWLNWYQQKPGKAPKLLIYAASTLQSGVPSRFSGSGSGTDFTLTISSLQPEDFATYYCQQYYTSPYTFGQGTKVEIKRGGGGSGGGGSGGGGSQVQLLESGGGLVQPGGSLRLSCAASGFTFSSYAMSWVRQAPGKGLEWVSVIRSSGSSTYYADSVKGRFTISRDNSKNTLYLQMNSLRAEDTAVYYCARGGGYFDYWGQGTLVTVSSTREQKLISEEDLAKPTTTPAPRPPTPAPTIASQPLSLRPEACRPAAGGAVHTRGLDFACDIYIWAPLAGTCGVLLLSLVITLYCKRGRKKLLYIFKQPFMRPVQTTQEEDGCSCRFPEEEEGGCELRVKFSRSADAPAYQQGQNQLYNELNLGRREEYDVLDKRRGRDPEMGGKPRRKNPQEGLYNELQKDKMAEAYSEIGMKGERRRGKGHDGLYQGLSTATKDTYDALHMQALPPRSSGSGEGRGSLLTCGDVEENPGPHMTEYKPTVRLATRDDVPRAVRTLAAAFADYPATRHTVDPDRHIERVTELQELFLTRVGLDIGKVWVADDGAAVAVWTTPESVEAGAVFAEIGPRMAELSGSRLAAQQQMEGLLAPHRPKEPAWFLATVGVSPDHQGKGLGSAVVLPGVEAAERAGVPAFLETSAPRNLPFYERLGFTVTADVEVPEGPRTWCMTRKPGA

SEQ ID NO: 3302 - protein, 724 aa, Artificial Sequence
  Synthetic Polypeptide
MALPVTALLLPLALLLHAARPDIQMTQSPSSLSASVGDRVTITCRASQSISSYLNWYQQKPGKAPKLLIYAVSTLQSGVPSRFSGSGSGTDFTLTISSLQPEDFATYYCQQSGTFPPTTFGQGTKVEIKRGGGGSGGGGSGGGGSQVQLLESGGGLVQPGGSLRLSCAASGFTFSSHGMHWVRQAPGKGLEWVSVISGSGSNTGYADSVKGRFTISRDNSKNTLYLQMNSLRAEDTAVYYCARQWGSYAFDSWGQGTLVTVSSTREQKLISEEDLAKPTTTPAPRPPTPAPTIASQPLSLRPEACRPAAGGAVHTRGLDFACDIYIWAPLAGTCGVLLLSLVITLYCKRGRKKLLYIFKQPFMRPVQTTQEEDGCSCRFPEEEEGGCELRVKFSRSADAPAYQQGQNQLYNELNLGRREEYDVLDKRRGRDPEMGGKPRRKNPQEGLYNELQKDKMAEAYSEIGMKGERRRGKGHDGLYQGLSTATKDTYDALHMQALPPRSSGSGEGRGSLLTCGDVEENPGPHMTEYKPTVRLATRDDVPRAVRTLAAAFADYPATRHTVDPDRHIERVTELQELFLTRVGLDIGKVWVADDGAAVAVWTTPESVEAGAVFAEIGPRMAELSGSRLAAQQQMEGLLAPHRPKEPAWFLATVGVSPDHQGKGLGSAVVLPGVEAAERAGVPAFLETSAPRNLPFYERLGFTVTADVEVPEGPRTWCMTRKPGA

SEQ ID NO: 3303 - protein, 734 aa, Artificial Sequence
  Synthetic Polypeptide
MALPVTALLLPLALLLHAARPDIVMSQSPSSLAVSVGEKVTMSCKSSQSLLHSSNQKNYLAWYQQKPGQSPKVLIYWASTRESGVPDRFTGSGSGTDFTLTITSVKSEDLAVYYCQQYYSYPWTFGGGTRLEIKRGGGGSGGGGSGGGGSEVQLQQSVAELVKPGASVKMSCKVSGYTLTDHTIHWMKQRPEQGLEWIGYIYPRDGITGYNEKFKGKATLTADTSSSTAYMQLNSLTSEDSAVYFCARWGYSYRNYAYYYDYWGQGTTLTVSSTREQKLISEEDLAKPTTTPAPRPPTPAPTIASQPLSLRPEACRPAAGGAVHTRGLDFACDIYIWAPLAGTCGVLLLSLVITLYCKRGRKKLLYIFKQPFMRPVQTTQEEDGCSCRFPEEEEGGCELRVKFSRSADAPAYQQGQNQLYNELNLGRREEYDVLDKRRGRDPEMGGKPRRKNPQEGLYNELQKDKMAEAYSEIGMKGERRRGKGHDGLYQGLSTATKDTYDALHMQALPPRSSGSGEGRGSLLTCGDVEENPGPHMTEYKPTVRLATRDDVPRAVRTLAAAFADYPATRHTVDPDRHIERVTELQELFLTRVGLDIGKVWVADDGAAVAVWTTPESVEAGAVFAEIGPRMAELSGSRLAAQQQMEGLLAPHRPKEPAWFLATVGVSPDHQGKGLGSAVVLPGVEAAERAGVPAFLETSAPRNLPFYERLGFTVTADVEVPEGPRTWCMTRKPGA

SEQ ID NO: 3304 - protein, 731 aa, Artificial Sequence
  Synthetic Polypeptide
MALPVTALLLPLALLLHAARPEIVLTQSPGTLSLSPGERATLSCRASQSVSSSYLAWYQQKPGQAPRLLIYGTSSRATGIPDRFSGSGSGTDFTLTISRLEPEDFAVYYCQQYGSSPFTFGGGTKVEIKRGGGGSGGGGSGGGGSQVQLQESGPGLAKPSETLSLTCTVSGDSITSYYWSWIRQPPGKGLEWIGYIYYSGSTNYNPSLKSRVTISVDTSKNQFSLKLSSVTAADTAVYYCARDQRRIAAAGTHFYGMDVWGQGTTVTVSSTREQKLISEEDLAKPTTTPAPRPPTPAPTIASQPLSLRPEACRPAAGGAVHTRGLDFACDIYIWAPLAGTCGVLLLSLVITLYCKRGRKKLLYIFKQPFMRPVQTTQEEDGCSCRFPEEEEGGCELRVKFSRSADAPAYQQGQNQLYNELNLGRREEYDVLDKRRGRDPEMGGKPRRKNPQEGLYNELQKDKMAEAYSEIGMKGERRRGKGHDGLYQGLSTATKDTYDALHMQALPPRSSGSGEGRGSLLTCGDVEENPGPHMTEYKPTVRLATRDDVPRAVRTLAAAFADYPATRHTVDPDRHIERVTELQELFLTRVGLDIGKVWVADDGAAVAVWTTPESVEAGAVFAEIGPRMAELSGSRLAAQQQMEGLLAPHRPKEPAWFLATVGVSPDHQGKGLGSAVVLPGVEAAERAGVPAFLETSAPRNLPFYERLGFTVTADVEVPEGPRTWCMTRKPGA

SEQ ID NO: 3305 - protein, 723 aa, Artificial Sequence
  Synthetic Polypeptide
MALPVTALLLPLALLLHAARPDILLTQSPVILSVSPGERVSFSCRASQSIGTNIHWYQQRTNGSPRLLIKYASESISGIPSRFSGSGSGTDFTLSINSVESEDIADYYCQQNNNWPTTFGAGTKLELKGGGGSGGGGSGGGGSQVQLKQSGPGLVQPSQSLSITCTVSGFSLTNYGVHWVRQSPGKGLEWLGVIWSGGNTDYNTPFTSRLSINKDNSKSQVFFKMNSLQSNDTAIYYCARALTYYDYEFAYWGQGTLVTVSATREQKLISEEDLAKPTTTPAPRPPTPAPTIASQPLSLRPEACRPAAGGAVHTRGLDFACDIYIWAPLAGTCGVLLLSLVITLYCKRGRKKLLYIFKQPFMRPVQTTQEEDGCSCRFPEEEEGGCELRVKFSRSADAPAYQQGQNQLYNELNLGRREEYDVLDKRRGRDPEMGGKPRRKNPQEGLYNELQKDKMAEAYSEIGMKGERRRGKGHDGLYQGLSTATKDTYDALHMQALPPRSSGSGEGRGSLLTCGDVEENPGPHMTEYKPTVRLATRDDVPRAVRTLAAAFADYPATRHTVDPDRHIERVTELQELFLTRVGLDIGKVWVADDGAAVAVWTTPESVEAGAVFAEIGPRMAELSGSRLAAQQQMEGLLAPHRPKEPAWFLATVGVSPDHQGKGLGSAVVLPGVEAAERAGVPAFLETSAPRNLPFYERLGFTVTADVEVPEGPRTWCMTRKPGA

SEQ ID NO: 3306 - protein, 716 aa, Artificial Sequence
  Synthetic Polypeptide
MALPVTALLLPLALLLHAARPMTQSPKFLLVSAGDRVTLTCKASQSVNNDVYWYQQEPGQSPKLLIYWASTRESGVPDRFTGSGSGTDFTLTISSVQAEDLAVYYCKQSYNLYTFGGGTKLEIKRGGGGSGGGGSGGGGSESGRGLVQPGGSRKLSCAASGFTFSTSGMHWVRQAPEKGLEWVAYISSGSTTIYHADTVKGRFTISRDNPKNTLFLQMTSLRSEDTAMYYCCARSGQFGNYFDYWGQGTTLTVSSTREQKLISEEDLAKPTTTPAPRPPTPAPTIASQPLSLRPEACRPAAGGAVHTRGLDFACDIYIWAPLAGTCGVLLLSLVITLYCKRGRKKLLYIFKQPFMRPVQTTQEEDGCSCRFPEEEEGGCELRVKFSRSADAPAYQQGQNQLYNELNLGRREEYDVLDKRRGRDPEMGGKPRRKNPQEGLYNELQKDKMAEAYSEIGMKGERRRGKGHDGLYQGLSTATKDTYDALHMQALPPRSSGSGEGRGSLLTCGDVEENPGPHMTEYKPTVRLATRDDVPRAVRTLAAAFADYPATRHTVDPDRHIERVTELQELFLTRVGLDIGKVWVADDGAAVAVWTTPESVEAGAVFAEIGPRMAELSGSRLAAQQQMEGLLAPHRPKEPAWFLATVGVSPDHQGKGLGSAVVLPGVEAAERAGVPAFLETSAPRNLPFYERLGFTVTADVEVPEGPRTWCMTRKPGA

SEQ ID NO: 3307 - protein, 721 aa, Artificial Sequence
  Synthetic Polypeptide
MALPVTALLLPLALLLHAARPQSPSSLAVSAGEKVTMSCKSSQSLLNSRTRKNYLAWYQQKPGQSPKLLIYWASTRESGVPDRFTGSGSGTDFTLTISSVQAEDLAVYYCKQSNLYTFGGGTKLEIKGGGGSGGGGSGGGGSQVQLEESGPELVKPGASVKLSCKASGYTFTEYIIHWVKQRSGQGLEWIGWFYPGSGSIKYNEKFKDKATLTADKSSSTVYMELSGLTSEDSAVYFCARHDGYSYFDYWGQGTTLTVSSTREQKLISEEDLAKPTTTPAPRPPTPAPTIASQPLSLRPEACRPAAGGAVHTRGLDFACDIYIWAPLAGTCGVLLLSLVITLYCKRGRKKLLYIFKQPFMRPVQTTQEEDGCSCRFPEEEEGGCELRVKFSRSADAPAYQQGQNQLYNELNLGRREEYDVLDKRRGRDPEMGGKPRRKNPQEGLYNELQKDKMAEAYSEIGMKGERRRGKGHDGLYQGLSTATKDTYDALHMQALPPRSSGSGEGRGSLLTCGDVEENPGPHMTEYKPTVRLATRDDVPRAVRTLAAAFADYPATRHTVDPDRHIERVTELQELFLTRVGLDIGKVWVADDGAAVAVWTTPESVEAGAVFAEIGPRMAELSGSRLAAQQQMEGLLAPHRPKEPAWFLATVGVSPDHQGKGLGSAVVLPGVEAAERAGVPAFLETSAPRNLPFYERLGFTVTADVEVPEGPRTWCMTRKPGA

SEQ ID NO: 3308 - protein, 733 aa, Artificial Sequence
  Synthetic Polypeptide
MEMFQGLLLLLLLSMGGTWASREMLRPRCRPINATLAVEKEGCPVCITVNTTICAGYCPTMTRVLQGVLPALPQVVCNYRDVRFESIRLPGCPRGVNPVVSYAVALSCQCALCRRSTTDCGGPKDHPLTCDDPRFQASSSSKAPPPSLPSPSRLPGPSDTPILPQGGGGSGGGGSGGGGSAPDVQDCPECTLQENPFFSQPGAPILQCMGCCFSRAYPTPLRSKKTMLVQKNVTSESTCCVAKSYNRVTVMGGFKVENHTACHCSTCYYHKSTREQKLISEEDLAKPTTTPAPRPPTPAPTIASQPLSLRPEACRPAAGGAVHTRGLDFACDIYIWAPLAGTCGVLLLSLVITLYCKRGRKKLLYIFKQPFMRPVQTTQEEDGCSCRFPEEEEGGCELRVKFSRSADAPAYQQGQNQLYNELNLGRREEYDVLDKRRGRDPEMGGKPRRKNPQEGLYNELQKDKMAEAYSEIGMKGERRRGKGHDGLYQGLSTATKDTYDALHMQALPPRSSGSGEGRGSLLTCGDVEENPGPHMTEYKPTVRLATRDDVPRAVRTLAAAFADYPATRHTVDPDRHIERVTELQELFLTRVGLDIGKVWVADDGAAVAVWTTPESVEAGAVFAEIGPRMAELSGSRLAAQQQMEGLLAPHRPKEPAWFLATVGVSPDHQGKGLGSAVVLPGVEAAERAGVPAFLETSAPRNLPFYERLGFTVTADVEVPEGPRTWCMTRKPGA

SEQ ID NO: 3309 - protein, 724 aa, Artificial Sequence
  Synthetic Polypeptide
MALPVTALLLPLALLLHAARPDIQMTQSPSSLSASLGERVSLTCRATQELSGYLSWLQQKPDGTIKRLIYAASTLDSGVPKRFSGNRSGSDYSLTISSLESEDFADYYCLQYAIYPYTFGGGTKLEIKGGGGSGGGGSGGGGSEVQLQQSGPELVKPGASVKMSCKASGYTFTSYFIHWVKQKPGQGLEWIGFINPYNDGSKYNEKFKGKATLTSDKSSSTAYMELSSLTSEDSAVYYCTRDDGYYGYAMDYWGQGTSVTVSSTREQKLISEEDLAKPTTTPAPRPPTPAPTIASQPLSLRPEACRPAAGGAVHTRGLDFACDIYIWAPLAGTCGVLLLSLVITLYCKRGRKKLLYIFKQPFMRPVQTTQEEDGCSCRFPEEEEGGCELRVKFSRSADAPAYQQGQNQLYNELNLGRREEYDVLDKRRGRDPEMGGKPRRKNPQEGLYNELQKDKMAEAYSEIGMKGERRRGKGHDGLYQGLSTATKDTYDALHMQALPPRSSGSGEGRGSLLTCGDVEENPGPHMTEYKPTVRLATRDDVPRAVRTLAAAFADYPATRHTVDPDRHIERVTELQELFLTRVGLDIGKVWVADDGAAVAVWTTPESVEAGAVFAEIGPRMAELSGSRLAAQQQMEGLLAPHRPKEPAWFLATVGVSPDHQGKGLGSAVVLPGVEAAERAGVPAFLETSAPRNLPFYERLGFTVTADVEVPEGPRTWCMTRKPGA

SEQ ID NO: 3310 - protein, 729 aa, Artificial Sequence
  Synthetic Polypeptide
MALPVTALLLPLALLLHAARPDTIVLTQSPASLAVSLGQRATISCRASESVDSYGNSFMHWYQQKPGQPPKLLIYLASNLESGVPARFSGSGSRTDFTLTIDPVEADDAATYYCQQNNYDPWTFGGGTKLEIKGGGGSGGGGSGGGGSEVQLQQSGPELVKPGASVKMSCKASGYTFTSYVMHWVKQKPGQGLEWIGYINPYNDGTKYNEKFKGKATLTSDTSSSTAYMELNSLTSEDSAVYFCARPIYFDNDYFDYWGQGTTLKVSSTREQKLISEEDLAKPTTTPAPRPPTPAPTIASQPLSLRPEACRPAAGGAVHTRGLDFACDIYIWAPLAGTCGVLLLSLVITLYCKRGRKKLLYIFKQPFMRPVQTTQEEDGCSCRFPEEEEGGCELRVKFSRSADAPAYQQGQNQLYNELNLGRREEYDVLDKRRGRDPEMGGKPRRKNPQEGLYNELQKDKMAEAYSEIGMKGERRRGKGHDGLYQGLSTATKDTYDALHMQALPPRSSGSGEGRGSLLTCGDVEENPGPHMTEYKPTVRLATRDDVPRAVRTLAAAFADYPATRHTVDPDRHIERVTELQELFLTRVGLDIGKVWVADDGAAVAVWTTPESVEAGAVFAEIGPRMAELSGSRLAAQQQMEGLLAPHRPKEPAWFLATVGVSPDHQGKGLGSAVVLPGVEAAERAGVPAFLETSAPRNLPFYERLGFTVTADVEVPEGPRTWCMTRKPGA

SEQ ID NO: 3311 - protein, 724 aa, Artificial Sequence
  Synthetic Polypeptide
MALPVTALLLPLALLLHAARPDIQMTQSPSSLSASVGDRVTITCKASQDVSTAVAWFQQKPGKAPKLLIYSPSYRYTGVPSRFSGSGSGTDFTLTISSLQPEDFTYYCQQLYSTPYTFGQGTKVEIKGGGGSGGGGSGGGGSEVQLVQSGAEVKKPGASVKVSCKASGYTFTDYYLDVVVRQAPGQGLEWIGRVNPYNGGTIYNQKFKGRVTLTRDTSTSTAYLELSSLRSEDTAVYYCARDHYRYDPLLDYWGQGTLVTVSSTREQKLISEEDLAKPTTTPAPRPPTPAPTIASQPLSLRPEACRPAAGGAVHTRGLDFACDIYIWAPLAGTCGVLLLSLVITLYCKRGRKKLLYIFKQPFMRPVQTTQEEDGCSCRFPEEEEGGCELRVKFSRSADAPAYQQGQNQLYNELNLGRREEYDVLDKRRGRDPEMGGKPRRKNPQEGLYNELQKDKMAEAYSEIGMKGERRRGKGHDGLYQGLSTATKDTYDALHMQALPPRSSGSGEGRGSLLTCGDVEENPGPHMTEYKPTVRLATRDDVPRAVRTLAAAFADYPATRHTVDPDRHIERVTELQELFLTRVGLDIGKVWVADDGAAVAVWTTPESVEAGAVFAEIGPRMAELSGSRLAAQQQMEGLLAPHRPKEPAWFLATVGVSPDHQGKGLGSAVVLPGVEAAERAGVPAFLETSAPRNLPFYERLGFTVTADVEVPEGPRTWCMTRKPGA

SEQ ID NO: 3312 - protein, 730 aa, Artificial Sequence
  Synthetic Polypeptide
MALPVTALLLPLALLLHAARPDIQMTQSPSSLSASVGDRVTITCRASQSVSTSSYNYMHWYQQKPGKPPKLLIKYASNLESGVPSRFSGSGSGTDFTLTISSLQPEDFATYYCQHSWEIPLTFGQGTKVEIKGGGGSGGGGSGGGGSEVQLVQSGAEVKKPGASVKVSCKASGYSFTDYYMHWVRQAPGQGLEWIGRINPYNGAAFYSQNFKDRVTLTVDTSTSTAYLELSSLRSEDTAVYYCAIERGADLEGYAMDYWGQGTLVTVSSTREQKLISEEDLAKPTTTPAPRPPTPAPTIASQPLSLRPEACRPAAGGAVHTRGLDFACDIYIWAPLAGTCGVLLLSLVITLYCKRGRKKLLYIFKQPFMRPVQTTQEEDGCSCRFPEEEEGGCELRVKFSRSADAPAYQQGQNQLYNELNLGRREEYDVLDKRRGRDPEMGGKPRRKNPQEGLYNELQKDKMAEAYSEIGMKGERRRGKGHDGLYQGLSTATKDTYDALHMQALPPRSSGSGEGRGSLLTCGDVEENPGPHMTEYKPTVRLATRDDVPRAVRTLAAAFADYPATRHTVDPDRHIERVTELQELFLTRVGLDIGKVWVADDGAAVAVWTTPESVEAGAVFAEIGPRMAELSGSRLAAQQQMEGLLAPHRPKEPAWFLATVGVSPDHQGKGLGSAVVLPGVEAAERAGVPAFLETSAPRNLPFYERLGFTVTADVEVPEGPRTWCMTRKPGA

SEQ ID NO: 3313 - protein, 728 aa, Artificial Sequence
  Synthetic Polypeptide
MALPVTALLLPLALLLHAARPEIVLTQSPATLSASPGERVTLTCRASSNVISSYVHWYQQKPGSSPRLFLYSTSNLASGVPSRFSGSGSGTDFTFTISSLEAEDAATYYCQQYSGYPLTFGQGTRLEIKGGGGSGGGGSGGGGSQVQLQESGPGLVKPSETLSLTCAVSGYSITSAYYWNWIRQPPGKGLEWIGYISYDGRNNYNPSLKNRITINPDTSKNQFSLQLNSVTPEDTAVYYCAREGDYDVGNYYAMDYWGQGTLVTVSSTREQKLISEEDLAKPTTTPAPRPPTPAPTIASQPLSLRPEACRPAAGGAVHTRGLDFACDIYIWAPLAGTCGVLLLSLVITLYCKRGRKKLLYIFKQPFMRPVQTTQEEDGCSCRFPEEEEGGCELRVKFSRSADAPAYQQGQNQLYNELNLGRREEYDVLDKRRGRDPEMGGKPRRKNPQEGLYNELQKDKMAEAYSEIGMKGERRRGKGHDGLYQGLSTATKDTYDALHMQALPPRSSGSGEGRGSLLTCGDVEENPGPHMTEYKPTVRLATRDDVPRAVRTLAAAFADYPATRHTVDPDRHIERVTELQELFLTRVGLDIGKVWVADDGAAVAVWTTPESVEAGAVFAEIGPRMAELSGSRLAAQQQMEGLLAPHRPKEPAWFLATVGVSPDHQGKGLGSAVVLPGVEAAERAGVPAFLETSAPRNLPFYERLGFTVTADVEVPEGPRTWCMTRKPGA

SEQ ID NO: 3314 - protein, 728 aa, Artificial Sequence
  Synthetic Polypeptide
MALPVTALLLPLALLLHAARPEIVLTQSPATLSLSPGERATLSCRASSNVISSYVHWYQQKPGQAPRLLIYSTSNLASGIPARFSGSGSGTDFTLTISSLEPEDFAVYYCQQYSGYPLTFGQGTRLEIKGGGGSGGGGSGGGGSEVQLVESGGGLVQPGRSLRLSCAASGYSITSAYYWNWVRQAPGKGLEWVSYISYDGRNNYNPSLKNRFTISRDNAKKSLYLQMNSLRAEDTALYYCAKEGDYDVGNYYAMDYWGQGTTVTVSSTREQKLISEEDLAKPTTTPAPRPPTPAPTIASQPLSLRPEACRPAAGGAVHTRGLDFACDIYIWAPLAGTCGVLLLSLVITLYCKRGRKKLLYIFKQPFMRPVQTTQEEDGCSCRFPEEEEGGCELRVKFSRSADAPAYQQGQNQLYNELNLGRREEYDVLDKRRGRDPEMGGKPRRKNPQEGLYNELQKDKMAEAYSEIGMKGERRRGKGHDGLYQGLSTATKDTYDALHMQALPPRSSGSGEGRGSLLTCGDVEENPGPHMTEYKPTVRLATRDDVPRAVRTLAAAFADYPATRHTVDPDRHIERVTELQELFLTRVGLDIGKVWVADDGAAVAVWTTPESVEAGAVFAEIGPRMAELSGSRLAAQQQMEGLLAPHRPKEPAWFLATVGVSPDHQGKGLGSAVVLPGVEAAERAGVPAFLETSAPRNLPFYERLGFTVTADVEVPEGPRTWCMTRKPGA

SEQ ID NO: 3315 - protein, 740 aa, Artificial Sequence
  Synthetic Polypeptide
MALPVTALLLPLALLLHAARPDLNFMLTQPHSVSGSPGKTVTISCTRSTGSITSNYVHWYQQRPGSSPTTVICEDNERPSGVPDRFSGSIDISSNSASLTISGLKTEDEADYYCQSYDDSNHISVFGTGTKVTVLGQPKANPGGGGSGGGGSGGGGSQVQLQESGPGLVKPSETLSLTCTVSGGSISSSNYYWGWIRQPPGKGLEWIGAIYYSGSTYYNPSLKSRVAISVDTSKNQFSLKLSSVTAADTAVYYCARRIGVAGQWYFDLWGRGTLVTVSSTREQKLISEEDLAKPTTTPAPRPPTPAPTIASQPLSLRPEACRPAAGGAVHTRGLDFACDIYIWAPLAGTCGVLLLSLVITLYCKRGRKKLLYIFKQPFMRPVQTTQEEDGCSCRFPEEEEGGCELRVKFSRSADAPAYQQGQNQLYNELNLGRREEYDVLDKRRGRDPEMGGKPRRKNPQEGLYNELQKDKMAEAYSEIGMKGERRRGKGHDGLYQGLSTATKDTYDALHMQALPPRSSGSGEGRGSLLTCGDVEENPGPHMTEYKPTVRLATRDDVPRAVRTLAAAFADYPATRHTVDPDRHIERVTELQELFLTRVGLDIGKVWVADDGAAVAVWTTPESVEAGAVFAEIGPRMAELSGSRLAAQQQMEGLLAPHRPKEPAWFLATVGVSPDHQGKGLGSAVVLPGVEAAERAGVPAFLETSAPRNLPFYERLGFTVTADVEVPEGPRTWCMTRKPGA

SEQ ID NO: 3316 - protein, 726 aa, Artificial Sequence
  Synthetic Polypeptide
MALPVTALLLPLALLLHAARPDIQMTQSPSSLSASVGDRVTITCKASQDVGIAVAWYQQKPGKVPKLLIYWASTRHTGVPDRFSGSGSGTDFTLTISSLQPEDVATYYCQQYSSYPYTFGQGTKVEIKGGGGSGGGGSGGGGSQIQLVQSGPDLKKPGETVKISCKASGYTFTNTGMNWVKQAPGKGLKWMGWINTYTGEPTYADDFKGRFTFSLETSASTAYLQINNLKNEDTATYFCTRWGYGSSLYYAMDYWGQGTSVTVSSTREQKLISEEDLAKPTTTPAPRPPTPAPTIASQPLSLRPEACRPAAGGAVHTRGLDFACDIYIWAPLAGTCGVLLLSLVITLYCKRGRKKLLYIFKQPFMRPVQTTQEEDGCSCRFPEEEEGGCELRVKFSRSADAPAYQQGQNQLYNELNLGRREEYDVLDKRRGRDPEMGGKPRRKNPQEGLYNELQKDKMAEAYSEIGMKGERRRGKGHDGLYQGLSTATKDTYDALHMQALPPRSSGSGEGRGSLLTCGDVEENPGPHMTEYKPTVRLATRDDVPRAVRTLAAAFADYPATRHTVDPDRHIERVTELQELFLTRVGLDIGKVWVADDGAAVAVWTTPESVEAGAVFAEIGPRMAELSGSRLAAQQQMEGLLAPHRPKEPAWFLATVGVSPDHQGKGLGSAVVLPGVEAAERAGVPAFLETSAPRNLPFYERLGFTVTADVEVPEGPRTWCMTRKPGA

SEQ ID NO: 3317 - protein, 723 aa, Artificial Sequence
  Synthetic Polypeptide
MALPVTALLLPLALLLHAARPDIQMTQSPSSLSASVGDRVTITCKASQDVGIAVAWYQQKPGKVPKLLIYWASTRHTGVPDRFSGSGSGTDFTLTISSLQPEDVATYYCQQYSSYPYTFGQGTKVEIKGGGGSGGGGSGGGGSEVQLVESGGGLVQPGGSLRLSCAASGFDFSRYWMSWVRQAPGKGLEWIGEINPDSSTINYAPSLKDKFIISRDNAKNSLYLQMNSLRAEDTAVYYCARPDGNYWYFDVWGQGTLVTVSSTREQKLISEEDLAKPTTTPAPRPPTPAPTIASQPLSLRPEACRPAAGGAVHTRGLDFACDIYIWAPLAGTCGVLLLSLVITLYCKRGRKKLLYIFKQPFMRPVQTTQEEDGCSCRFPEEEEGGCELRVKFSRSADAPAYQQGQNQLYNELNLGRREEYDVLDKRRGRDPEMGGKPRRKNPQEGLYNELQKDKMAEAYSEIGMKGERRRGKGHDGLYQGLSTATKDTYDALHMQALPPRSSGSGEGRGSLLTCGDVEENPGPHMTEYKPTVRLATRDDVPRAVRTLAAAFADYPATRHTVDPDRHIERVTELQELFLTRVGLDIGKVWVADDGAAVAVWTTPESVEAGAVFAEIGPRMAELSGSRLAAQQQMEGLLAPHRPKEPAWFLATVGVSPDHQGKGLGSAVVLPGVEAAERAGVPAFLETSAPRNLPFYERLGFTVTADVEVPEGPRTWCMTRKPGA

SEQ ID NO: 3318 - protein, 724 aa, Artificial Sequence
  Synthetic Polypeptide
MALPVTALLLPLALLLHAARPDIVMTQSQKSMSTSVGDRVSITCKASQDVITGVAWYQQKPGQSPKLLIYSASYRYTGVPDRFTGSGSGTDFTFTISNVQAEDLAVYYCQQHYSTPLTFGAGTKLELKGGGGSGGGGSGGGGSQVQLQQPGAELVRPGASVKLSCKASGYSFTTYWMNWVKQRPGQGLEWIGMIHPSDSETRLNQKFKDKATLTVDKSSSTAYMQLSSPTSEDSAVYYCARSTMIATRAMDYWGQGTSVTVSSTREQKLISEEDLAKPTTTPAPRPPTPAPTIASQPLSLRPEACRPAAGGAVHTRGLDFACDIYIWAPLAGTCGVLLLSLVITLYCKRGRKKLLYIFKQPFMRPVQTTQEEDGCSCRFPEEEEGGCELRVKFSRSADAPAYQQGQNQLYNELNLGRREEYDVLDKRRGRDPEMGGKPRRKNPQEGLYNELQKDKMAEAYSEIGMKGERRRGKGHDGLYQGLSTATKDTYDALHMQALPPRSSGSGEGRGSLLTCGDVEENPGPHMTEYKPTVRLATRDDVPRAVRTLAAAFADYPATRHTVDPDRHIERVTELQELFLTRVGLDIGKVWVADDGAAVAVWTTPESVEAGAVFAEIGPRMAELSGSRLAAQQQMEGLLAPHRPKEPAWFLATVGVSPDHQGKGLGSAVVLPGVEAAERAGVPAFLETSAPRNLPFYERLGFTVTADVEVPEGPRTWCMTRKPGA

SEQ ID NO: 3319 - protein, 726 aa, Artificial Sequence
  Synthetic Polypeptide
MALPVTALLLPLALLLHAARPDIQMTQSPSSLSASVGDRVTITCKASQDVSTAVAWYQQKPGKAPKLLIYSASYRYTGVPDRFTGSGSGTDFTLTISSLQPEDFATYYCQQHYSTPPYTFGGGTKVEIKRGGGGSGGGGSGGGGSQVQLVQSGAEVKKPGASVKVSCKASGYAFSSSWMNWVRQAPGQGLEWIGRIYPGDGDTKYNGKFKGKATLTADKSTSTAYMELSSLRSEDTAVYYCARSTMIATGAMDYWGQGTLVTVSSTREQKLISEEDLAKPTTTPAPRPPTPAPTIASQPLSLRPEACRPAAGGAVHTRGLDFACDIYIWAPLAGTCGVLLLSLVITLYCKRGRKKLLYIFKQPFMRPVQTTQEEDGCSCRFPEEEEGGCELRVKFSRSADAPAYQQGQNQLYNELNLGRREEYDVLDKRRGRDPEMGGKPRRKNPQEGLYNELQKDKMAEAYSEIGMKGERRRGKGHDGLYQGLSTATKDTYDALHMQALPPRSSGSGEGRGSLLTCGDVEENPGPHMTEYKPTVRLATRDDVPRAVRTLAAAFADYPATRHTVDPDRHIERVTELQELFLTRVGLDIGKVWVADDGAAVAVWTTPESVEAGAVFAEIGPRMAELSGSRLAAQQQMEGLLAPHRPKEPAWFLATVGVSPDHQGKGLGSAVVLPGVEAAERAGVPAFLETSAPRNLPFYERLGFTVTADVEVPEGPRTWCMTRKPGA

SEQ ID NO: 3320 - protein, 727 aa, Artificial Sequence
  Synthetic Polypeptide
MALPVTALLLPLALLLHAARPDVVMTQTPLSLSVTPGQPASISCRSSQSLVHNNGNTYLHWYLQKPGQSPQLLIYKVSNRFSGVPDRFSGSGSGTDFTLKISRVEAEDVGVYFCSQSTHVPPYTFGGGTKVEIKGGGGSGGGGSGGGGSEVQLVESGGGLVQPGGSLRLSCAASGFTFSDYYMAWVRQAPGKGLEWVAEINYDGSSTYYVDSVKGRFTISRDNAKNSLYLQMNSLRAEDTAVYYCARDRGFYFDYWGQGTTVTVSSTREQKLISEEDLAKPTTTPAPRPPTPAPTIASQPLSLRPEACRPAAGGAVHTRGLDFACDIYIWAPLAGTCGVLLLSLVITLYCKRGRKKLLYIFKQPFMRPVQTTQEEDGCSCRFPEEEEGGCELRVKFSRSADAPAYQQGQNQLYNELNLGRREEYDVLDKRRGRDPEMGGKPRRKNPQEGLYNELQKDKMAEAYSEIGMKGERRRGKGHDGLYQGLSTATKDTYDALHMQALPPRSSGSGEGRGSLLTCGDVEENPGPHMTEYKPTVRLATRDDVPRAVRTLAAAFADYPATRHTVDPDRHIERVTELQELFLTRVGLDIGKVWVADDGAAVAVWTTPESVEAGAVFAEIGPRMAELSGSRLAAQQQMEGLLAPHRPKEPAWFLATVGVSPDHQGKGLGSAVVLPGVEAAERAGVPAFLETSAPRNLPFYERLGFTVTADVEVPEGPRTWCMTRKPGA

SEQ ID NO: 3321 - protein, 727 aa, Artificial Sequence
  Synthetic Polypeptide
MALPVTALLLPLALLLHAARPDVVMTQTPLSLSVTPGQPASISCRSSQSLVHSNGLTYLHWYLQKPGQSPQLLIYKVSNRFSGVPDRFSGSGSGTDFTLKISRVEAEDVGVYFCSQSTHVPPFTFGGGTKVEIKGGGGSGGGGSGGGGSEVQLVESGGGLVQPGGSLRLSCAASGFTFSDYYMAWVRQAPGKGLEWVASINYDGESTYYVDSVKGRFTISRDNAKNSLYLQMNSLRAEDTAVYYCARDRGYYFDYWGQGTTVTVSSTREQKLISEEDLAKPTTTPAPRPPTPAPTIASQPLSLRPEACRPAAGGAVHTRGLDFACDIYIWAPLAGTCGVLLLSLVITLYCKRGRKKLLYIFKQPFMRPVQTTQEEDGCSCRFPEEEEGGCELRVKFSRSADAPAYQQGQNQLYNELNLGRREEYDVLDKRRGRDPEMGGKPRRKNPQEGLYNELQKDKMAEAYSEIGMKGERRRGKGHDGLYQGLSTATKDTYDALHMQALPPRSSGSGEGRGSLLTCGDVEENPGPHMTEYKPTVRLATRDDVPRAVRTLAAAFADYPATRHTVDPDRHIERVTELQELFLTRVGLDIGKVWVADDGAAVAVWTTPESVEAGAVFAEIGPRMAELSGSRLAAQQQMEGLLAPHRPKEPAWFLATVGVSPDHQGKGLGSAVVLPGVEAAERAGVPAFLETSAPRNLPFYERLGFTVTADVEVPEGPRTWCMTRKPGA

SEQ ID NO: 3322 - protein, 727 aa, Artificial Sequence
  Synthetic Polypeptide
MALPVTALLLPLALLLHAARPDVVMTQSPLSLPVTPGEPASISCRSSQSLVHSNGNTYLHWYLQKPGQSPQLLIYKVSNRFSGVPDRFSGSGSGTDFTLKISRVEAEDVGVYFCSQSTHVPPFTFGGGTKVEIKGGGGSGGGGSGGGGSEVQLVESGGGLVQPGGSLRLSCAASGFTFSDYYMAWVRQAPGKGLEWVADINYDGGSTYYLDSLKSRFTISRDNAKNSLYLQMNSLRAEDTAVYYCARDRGYYFDYWGQGTLVTVSSTREQKLISEEDLAKPTTTPAPRPPTPAPTIASQPLSLRPEACRPAAGGAVHTRGLDFACDIYIWAPLAGTCGVLLLSLVITLYCKRGRKKLLYIFKQPFMRPVQTTQEEDGCSCRFPEEEEGGCELRVKFSRSADAPAYQQGQNQLYNELNLGRREEYDVLDKRRGRDPEMGGKPRRKNPQEGLYNELQKDKMAEAYSEIGMKGERRRGKGHDGLYQGLSTATKDTYDALHMQALPPRSSGSGEGRGSLLTCGDVEENPGPHMTEYKPTVRLATRDDVPRAVRTLAAAFADYPATRHTVDPDRHIERVTELQELFLTRVGLDIGKVWVADDGAAVAVWTTPESVEAGAVFAEIGPRMAELSGSRLAAQQQMEGLLAPHRPKEPAWFLATVGVSPDHQGKGLGSAVVLPGVEAAERAGVPAFLETSAPRNLPFYERLGFTVTADVEVPEGPRTWCMTRKPGA

SEQ ID NO: 3323 - protein, 725 aa, Artificial Sequence
  Synthetic Polypeptide
MALPVTALLLPLALLLHAARPDIQMTQSSSYLSVSLGGRVTITCKASDHINNWLAWYQQKPGNAPRLLISGATSLETGVPSRFSGSGSGKDYTLSITSLQTEDVATYYCQQYWSTPWTFGGGTKLEIKGGGGSGGGGSGGGGSQVQLQQSGAELARPGASVKLSCKASGYTFTSYWMQWVKQRPGQGLEWIGAIYPGDGDTRYTQKFKGKATLTADKSSSTAYMQLSSLASEDSAVYYCARGKVYYGSNPFAYWGQGTLVTVSATREQKLISEEDLAKPTTTPAPRPPTPAPTIASQPLSLRPEACRPAAGGAVHTRGLDFACDIYIWAPLAGTCGVLLLSLVITLYCKRGRKKLLYIFKQPFMRPVQTTQEEDGCSCRFPEEEEGGCELRVKFSRSADAPAYQQGQNQLYNELNLGRREEYDVLDKRRGRDPEMGGKPRRKNPQEGLYNELQKDKMAEAYSEIGMKGERRRGKGHDGLYQGLSTATKDTYDALHMQALPPRSSGSGEGRGSLLTCGDVEENPGPHMTEYKPTVRLATRDDVPRAVRTLAAAFADYPATRHTVDPDRHIERVTELQELFLTRVGLDIGKVWVADDGAAVAVWTTPESVEAGAVFAEIGPRMAELSGSRLAAQQQMEGLLAPHRPKEPAWFLATVGVSPDHQGKGLGSAVVLPGVEAAERAGVPAFLETSAPRNLPFYERLGFTVTADVEVPEGPRTWCMTRKPGA

SEQ ID NO: 3324 - protein, 725 aa, Artificial Sequence
  Synthetic Polypeptide
MALPVTALLLPLALLLHAARPDIVMTQSHKFMSTSVGDRVSITCKASQDVSTAVAWYQQKPGQSPKLLIYSASYRYTGVPDRFTGSGSGTDFTFTISSVQAEDLAVYYCQQHYSTPPYTFGGGTKLEIKGGGGSGGGGSGGGGSQVQLQQSGPELVKPGASVKISCKASGYAFSSSWMNWVKQRPGQGLEWIGRIYPGDGDTKYNGKFKGKATLTADKSSSTAYMQLSSLTSVDSAVYFCARSTMIATGAMDYWGQGTSVTVSSTREQKLISEEDLAKPTTTPAPRPPTPAPTIASQPLSLRPEACRPAAGGAVHTRGLDFACDIYIWAPLAGTCGVLLLSLVITLYCKRGRKKLLYIFKQPFMRPVQTTQEEDGCSCRFPEEEEGGCELRVKFSRSADAPAYQQGQNQLYNELNLGRREEYDVLDKRRGRDPEMGGKPRRKNPQEGLYNELQKDKMAEAYSEIGMKGERRRGKGHDGLYQGLSTATKDTYDALHMQALPPRSSGSGEGRGSLLTCGDVEENPGPHMTEYKPTVRLATRDDVPRAVRTLAAAFADYPATRHTVDPDRHIERVTELQELFLTRVGLDIGKVWVADDGAAVAVWTTPESVEAGAVFAEIGPRMAELSGSRLAAQQQMEGLLAPHRPKEPAWFLATVGVSPDHQGKGLGSAVVLPGVEAAERAGVPAFLETSAPRNLPFYERLGFTVTADVEVPEGPRTWCMTRKPGA

SEQ ID NO: 3325 - protein, 730 aa, Artificial Sequence
  Synthetic Polypeptide
MALPVTALLLPLALLLHAARPQSVLTQPPSVSGAPGQRVTISCTGSGSNIGAPYDVSWYQQLPGTAPKLLIYHNNKRPSGVPDRFSGSKSGTSASLAITGLQAEDEADYYCATVEAGLSGSVFGGGTKLTVLGAGGGGSGGGGSGGGGSQVQLVQSGAEVKKPGASVKVSCKVSGYTLTELSIHWVRQAPGKGLEWMGGFDPEENEIVYAQRFQGRVTMTEDTSTDTAYMELSSLRSEDTAVYYCAIVGSFSPLTLGLWGQGTMVTVSSTREQKLISEEDLAKPTTTPAPRPPTPAPTIASQPLSLRPEACRPAAGGAVHTRGLDFACDIYIWAPLAGTCGVLLLSLVITLYCKRGRKKLLYIFKQPFMRPVQTTQEEDGCSCRFPEEEEGGCELRVKFSRSADAPAYQQGQNQLYNELNLGRREEYDVLDKRRGRDPEMGGKPRRKNPQEGLYNELQKDKMAEAYSEIGMKGERRRGKGHDGLYQGLSTATKDTYDALHMQALPPRSSGSGEGRGSLLTCGDVEENPGPHMTEYKPTVRLATRDDVPRAVRTLAAAFADYPATRHTVDPDRHIERVTELQELFLTRVGLDIGKVWVADDGAAVAVWTTPESVEAGAVFAEIGPRMAELSGSRLAAQQQMEGLLAPHRPKEPAWFLATVGVSPDHQGKGLGSAVVLPGVEAAERAGVPAFLETSAPRNLPFYERLGFTVTADVEVPEGPRTWCMTRKPGA

SEQ ID NO: 3326 - protein, 730 aa, Artificial Sequence
  Synthetic Polypeptide
MALPVTALLLPLALLLHAARPQSVLTQPPSVSGAPGQRVTISCTGSGSNIGAPYDVSWYQQLPGTAPKLLIYHNNKRPSGVPDRFSGSKSGTSASLAITGLQAEDEADYYCQSYDSSSISTIFGGGTKLTVLGAGGGGSGGGGSGGGGSQVQLVQSGAEVKKPGASVKVSCKVSGYTLTELSIHWVRQAPGKGLEWMGGFDPEENEIVYAQRFQGRVTMTEDTSTDTAYMELSSLRSEDTAVYYCAIVGSFSGIAYRPWGQGTMVTVSSTREQKLISEEDLAKPTTTPAPRPPTPAPTIASQPLSLRPEACRPAAGGAVHTRGLDFACDIYIWAPLAGTCGVLLLSLVITLYCKRGRKKLLYIFKQPFMRPVQTTQEEDGCSCRFPEEEEGGCELRVKFSRSADAPAYQQGQNQLYNELNLGRREEYDVLDKRRGRDPEMGGKPRRKNPQEGLYNELQKDKMAEAYSEIGMKGERRRGKGHDGLYQGLSTATKDTYDALHMQALPPRSSGSGEGRGSLLTCGDVEENPGPHMTEYKPTVRLATRDDVPRAVRTLAAAFADYPATRHTVDPDRHIERVTELQELFLTRVGLDIGKVWVADDGAAVAVWTTPESVEAGAVFAEIGPRMAELSGSRLAAQQQMEGLLAPHRPKEPAWFLATVGVSPDHQGKGLGSAVVLPGVEAAERAGVPAFLETSAPRNLPFYERLGFTVTADVEVPEGPRTWCMTRKPGA

SEQ ID NO: 3327 - protein, 741 aa, Artificial Sequence
  Synthetic Polypeptide
MALPVTALLLPLALLLHAARPDEFEVQLVESGGGLVQAGGSLRLSCVASGISSSKRNMGWYRQAPGKQRESVATISSGGNKDYTDAVKDRFTISRDTTKNTVYLQMNSLKPEDTAVYYCKIEAGTGWATRRGYTYWGQGTLVTVSSLEGGGGSGGGGSGGGGSFEVQLVESGGGLVQAGGSLRLSCAASGSIFSGNVMGWYRRQAPGKEREWVAAIASGGSIYYRDSVKGRFTISRDNAKNTVYLQMNSLKPEDTAVYYCNSHPPTLPYWGLGTQVTVSSTREQKLISEEDLAKPTTTPAPRPPTPAPTIASQPLSLRPEACRPAAGGAVHTRGLDFACDIYIWAPLAGTCGVLLLSLVITLYCKRGRKKLLYIFKQPFMRPVQTTQEEDGCSCRFPEEEEGGCELRVKFSRSADAPAYQQGQNQLYNELNLGRREEYDVLDKRRGRDPEMGGKPRRKNPQEGLYNELQKDKMAEAYSEIGMKGERRRGKGHDGLYQGLSTATKDTYDALHMQALPPRSSGSGEGRGSLLTCGDVEENPGPHMTEYKPTVRLATRDDVPRAVRTLAAAFADYPATRHTVDPDRHIERVTELQELFLTRVGLDIGKVWVADDGAAVAVWTTPESVEAGAVFAEIGPRMAELSGSRLAAQQQMEGLLAPHRPKEPAWFLATVGVSPDHQGKGLGSAVVLPGVEAAERAGVPAFLETSAPRNLPFYERLGFTVTADVEVPEGPRTWCMTRKPGA

SEQ ID NO: 3328 - protein, 775 aa, Artificial Sequence
  Synthetic Polypeptide
MALPVTALLLPLALLLHAARPDEFEVQLVESGGGLVQAGDSLRLSCAASGRAFSRYAMGWFRQAPGKEREFVAAIGWGPSKTNYADSVKGRFTISRDNAKNTVYLQMNTLKPEDTAVYSCAAKFVNTDSTWSRSEMYTYWGQGTLVTVSSLEGGGGSGGGGSGGGGSGSGGSGSGGSGSGGSGSGGSFEVQLVESGGGSVQAGGSLRLSCTTSGRALNMYVMGWFRQAPGNEREFVAATSSSGGSTSYPDSVKGRFTISRDNAKNTVYLQMNSLKPEDTAAYRCAASPYVSTPTMNILEEYRYWGLGTQVTVSSTREQKLISEEDLAKPTTTPAPRPPTPAPTIASQPLSLRPEACRPAAGGAVHTRGLDFACDIYIWAPLAGTCGVLLLSLVITLYCKRGRKKLLYIFKQPFMRPVQTTQEEDGCSCRFPEEEEGGCELRVKFSRSADAPAYQQGQNQLYNELNLGRREEYDVLDKRRGRDPEMGGKPRRKNPQEGLYNELQKDKMAEAYSEIGMKGERRRGKGHDGLYQGLSTATKDTYDALHMQALPPRSSGSGEGRGSLLTCGDVEENPGPHMTEYKPTVRLATRDDVPRAVRTLAAAFADYPATRHTVDPDRHIERVTELQELFLTRVGLDIGKVWVADDGAAVAVWTTPESVEAGAVFAEIGPRMAELSGSRLAAQQQMEGLLAPHRPKEPAWFLATVGVSPDHQGKGLGSAVVLPGVEAAERAGVPAFLETSAPRNLPFYERLGFTVTADVEVPEGPRTWCMTRKPGA

SEQ ID NO: 3329 - protein, 728 aa, Artificial Sequence
  Synthetic Polypeptide
MALPVTALLLPLALLLHAARPDIQMTQSPSSLSASVGDRVTITCSASSSVSYMYWYQQKPGKAPKLLIYLTSNLASGVPSRFSGSGSGTDFTLTISSLQPEDFATYYCQQWRSNPFTFGQGTKLEIKRGGGGSGGGGSGGGGSQITLKESGPTLVKPTQTLTLTCTFSGFSLSTSGMGVGWIRQPPGKALEWLAHIWWDDVKRYSPSLKSRLTITKDTSKNQVVLTMTNMDPVDTATYYCARIVSFDNDVVSAMDYWGQGTLVTVSSTREQKLISEEDLAKPTTTPAPRPPTPAPTIASQPLSLRPEACRPAAGGAVHTRGLDFACDIYIWAPLAGTCGVLLLSLVITLYCKRGRKKLLYIFKQPFMRPVQTTQEEDGCSCRFPEEEEGGCELRVKFSRSADAPAYQQGQNQLYNELNLGRREEYDVLDKRRGRDPEMGGKPRRKNPQEGLYNELQKDKMAEAYSEIGMKGERRRGKGHDGLYQGLSTATKDTYDALHMQALPPRSSGSGEGRGSLLTCGDVEENPGPHMTEYKPTVRLATRDDVPRAVRTLAAAFADYPATRHTVDPDRHIERVTELQELFLTRVGLDIGKVWVADDGAAVAVWTTPESVEAGAVFAEIGPRMAELSGSRLAAQQQMEGLLAPHRPKEPAWFLATVGVSPDHQGKGLGSAVVLPGVEAAERAGVPAFLETSAPRNLPFYERLGFTVTADVEVPEGPRTWCMTRKPGA

SEQ ID NO: 3330 - protein, 723 aa, Artificial Sequence
  Synthetic Polypeptide
MALPVTALLLPLALLLHAARPEIVMTQSPATLSVSPGERATLSCKASQSVSNDVVWYQQKPGQAPRLLIYYASNRYTGIPARFSGSGSGTEFTLTISSLQSEDFAVYYCQQDYTSPWTFGQGTKLEIKRGGGGSGGGGSGGGGSQVQLVQSGAEVKKPGASVKVSCKASGYTFTNYGMNWVRQAPGQGLEWMGWINTYTGEPTYADDFKGRVTMTTDTSTSTAYMELRSLRSDDTAVYYCARIGDSSPSDYWGQGTLVTVSSTREQKLISEEDLAKPTTTPAPRPPTPAPTIASQPLSLRPEACRPAAGGAVHTRGLDFACDIYIWAPLAGTCGVLLLSLVITLYCKRGRKKLLYIFKQPFMRPVQTTQEEDGCSCRFPEEEEGGCELRVKFSRSADAPAYQQGQNQLYNELNLGRREEYDVLDKRRGRDPEMGGKPRRKNPQEGLYNELQKDKMAEAYSEIGMKGERRRGKGHDGLYQGLSTATKDTYDALHMQALPPRSSGSGEGRGSLLTCGDVEENPGPHMTEYKPTVRLATRDDVPRAVRTLAAAFADYPATRHTVDPDRHIERVTELQELFLTRVGLDIGKVWVADDGAAVAVWTTPESVEAGAVFAEIGPRMAELSGSRLAAQQQMEGLLAPHRPKEPAWFLATVGVSPDHQGKGLGSAVVLPGVEAAERAGVPAFLETSAPRNLPFYERLGFTVTADVEVPEGPRTWCMTRKPGA

SEQ ID NO: 3331 - protein, 724 aa, Artificial Sequence
  Synthetic Polypeptide
MALPVTALLLPLALLLHAARPDSTDIQMTQSPSSLSASVGDRVTITCRASQSISSYLNWYQQKPGKAPKLLIYLASNLQSGVPSRFSGSGSGTDFTLTISSLQPEDFATYYCQQAEYMPLTFGQGTKVEIKRAGGGGSGGGGSGGGGSEVQLLESGGGLVQPGGSLRLSCAASGFTFSGYAMSWVRQAPGKGLEWVSEIAPPGLNTRYADSVKGRFTISRDNSKNTLYLQMNSLRAEDTAVYYCAKSDTAFDYWGQGTLVTVSTREQKLISEEDLAKPTTTPAPRPPTPAPTIASQPLSLRPEACRPAAGGAVHTRGLDFACDIYIWAPLAGTCGVLLLSLVITLYCKRGRKKLLYIFKQPFMRPVQTTQEEDGCSCRFPEEEEGGCELRVKFSRSADAPAYQQGQNQLYNELNLGRREEYDVLDKRRGRDPEMGGKPRRKNPQEGLYNELQKDKMAEAYSEIGMKGERRRGKGHDGLYQGLSTATKDTYDALHMQALPPRSSGSGEGRGSLLTCGDVEENPGPHMTEYKPTVRLATRDDVPRAVRTLAAAFADYPATRHTVDPDRHIERVTELQELFLTRVGLDIGKVWVADDGAAVAVWTTPESVEAGAVFAEIGPRMAELSGSRLAAQQQMEGLLAPHRPKEPAWFLATVGVSPDHQGKGLGSAVVLPGVEAAERAGVPAFLETSAPRNLPFYERLGFTVTADVEVPEGPRTWCMTRKPGA

SEQ ID NO: 3332 - protein, 727 aa, Artificial Sequence
  Synthetic Polypeptide
MALPVTALLLPLALLLHAARPDQAVLTQESALTTSPGETVTLTCRSSTGAVTTSNYANWVQEKPDHLFTGLIGGTNNRVPGVPARFSGSLIGDKAALTITGAQTEDEAIYFCVLWHSNHWVFGGGTKLTVLGGGGSGGGGSGGGGSDVQLVESGGGLVQPGGSRKLSCAASGFTFSSFGMHWVRQAPEKGLEWVAYISSGSSTLHYADTVKGRFTISRDNPKNTLFLQMTSLRSEDTAMYYCARWGNYPHYAMDYWGQGTSVTVSSTREQKLISEEDLAKPTTTPAPRPPTPAPTIASQPLSLRPEACRPAAGGAVHTRGLDFACDIYIWAPLAGTCGVLLLSLVITLYCKRGRKKLLYIFKQPFMRPVQTTQEEDGCSCRFPEEEEGGCELRVKFSRSADAPAYQQGQNQLYNELNLGRREEYDVLDKRRGRDPEMGGKPRRKNPQEGLYNELQKDKMAEAYSEIGMKGERRRGKGHDGLYQGLSTATKDTYDALHMQALPPRSSGSGEGRGSLLTCGDVEENPGPHMTEYKPTVRLATRDDVPRAVRTLAAAFADYPATRHTVDPDRHIERVTELQELFLTRVGLDIGKVWVADDGAAVAVWTTPESVEAGAVFAEIGPRMAELSGSRLAAQQQMEGLLAPHRPKEPAWFLATVGVSPDHQGKGLGSAVVLPGVEAAERAGVPAFLETSAPRNLPFYERLGFTVTADVEVPEGPRTWCMTRKPGA

SEQ ID NO: 3333 - protein, 609 aa, Artificial Sequence
  Synthetic Polypeptide
MALPVTALLLPLALLLHAARPDEFEVQLVESGGGSVQTGGSLRLTCAASGRTSRSYGMGWFRQAPGKEREFVSGISWRGDSTGYADSVKGRFTISRDNAKNTVDLQMNSLKPEDTAIYYCAAAAGSAWYGTLYEYDYWGQGTLVTVSSTREQKLISEEDLAKPTTTPAPRPPTPAPTIASQPLSLRPEACRPAAGGAVHTRGLDFACDIYIWAPLAGTCGVLLLSLVITLYCKRGRKKLLYIFKQPFMRPVQTTQEEDGCSCRFPEEEEGGCELRVKFSRSADAPAYQQGQNQLYNELNLGRREEYDVLDKRRGRDPEMGGKPRRKNPQEGLYNELQKDKMAEAYSEIGMKGERRRGKGHDGLYQGLSTATKDTYDALHMQALPPRSSGSGEGRGSLLTCGDVEENPGPHMTEYKPTVRLATRDDVPRAVRTLAAAFADYPATRHTVDPDRHIERVTELQELFLTRVGLDIGKVWVADDGAAVAVWTTPESVEAGAVFAEIGPRMAELSGSRLAAQQQMEGLLAPHRPKEPAWFLATVGVSPDHQGKGLGSAVVLPGVEAAERAGVPAFLETSAPRNLPFYERLGFTVTADVEVPEGPRTWCMTRKPGA

SEQ ID NO: 3334 - protein, 751 aa, Artificial Sequence
  Synthetic Polypeptide
MALPVTALLLPLALLLHAARPDEFEVQLVESGGGSVQTGGSLRLTCAASGRTSRSYGMGWFRQAPGKEREFVSGISWRGDSTGYADSVKGRFTISRDNAKNTVDLQMNSLKPEDTAIYYCAAAAGSAWYGTLYEYDYWGQGTLVTVSSLEGGGGSGGGGSGGGGSFEEVQLVESGGGSVQAGGSLRLSCAASGDTYGSYWMGWFRQAPGKEREGVAAINRGGGYTVYADSVKGRFTISRDTAKNTVYLQMNSLRPDDTADYYCAASGVLGGLHEDWFNYWGQGTLVTVSSTREQKLISEEDLAKPTTTPAPRPPTPAPTIASQPLSLRPEACRPAAGGAVHTRGLDFACDIYIWAPLAGTCGVLLLSLVITLYCKRGRKKLLYIFKQPFMRPVQTTQEEDGCSCRFPEEEEGGCELRVKFSRSADAPAYQQGQNQLYNELNLGRREEYDVLDKRRGRDPEMGGKPRRKNPQEGLYNELQKDKMAEAYSEIGMKGERRRGKGHDGLYQGLSTATKDTYDALHMQALPPRSSGSGEGRGSLLTCGDVEENPGPHMTEYKPTVRLATRDDVPRAVRTLAAAFADYPATRHTVDPDRHIERVTELQELFLTRVGLDIGKVWVADDGAAVAVWTTPESVEAGAVFAEIGPRMAELSGSRLAAQQQMEGLLAPHRPKEPAWFLATVGVSPDHQGKGLGSAVVLPGVEAAERAGVPAFLETSAPRNLPFYERLGFTVTADVEVPEGPRTWCMTRKPGA

SEQ ID NO: 3335 - protein, 770 aa, Artificial Sequence
  Synthetic Polypeptide
MALPVTALLLPLALLLHAARPDEFEVQLVESGGGSVQAGGSLRLTCAASGSTSRSYGMGWFRQAPGKEREFVSGISWRGDSTGYADSVKGRFTISRDNAKNTVDLQMNSLKPEDTAIYYCAAAAGSTWYGTLYEYDYWGQGTLVTVSSLEGGGGSGGGGSGGGGSGSGGSGSGGSGSGGSGSGGSFEVQLVESGGGSVQAGGSLRLSCAASGDTYGSYWMGWFRQAPGQEREAVAAINRGGGYTVYADSVKGRFTISRDNAKNTLYLQMNSLRPDDTADYYCAASGVLGGLHEDWFNYWGQGTLVTVSSTREQKLISEEDLAKPTTTPAPRPPTPAPTIASQPLSLRPEACRPAAGGAVHTRGLDFACDIYIWAPLAGTCGVLLLSLVITLYCKRGRKKLLYIFKQPFMRPVQTTQEEDGCSCRFPEEEEGGCELRVKFSRSADAPAYQQGQNQLYNELNLGRREEYDVLDKRRGRDPEMGGKPRRKNPQEGLYNELQKDKMAEAYSEIGMKGERRRGKGHDGLYQGLSTATKDTYDALHMQALPPRSSGSGEGRGSLLTCGDVEENPGPHMTEYKPTVRLATRDDVPRAVRTLAAAFADYPATRHTVDPDRHIERVTELQELFLTRVGLDIGKVWVADDGAAVAVWTTPESVEAGAVFAEIGPRMAELSGSRLAAQQQMEGLLAPHRPKEPAWFLATVGVSPDHQGKGLGSAVVLPGVEAAERAGVPAFLETSAPRNLPFYERLGFTVTADVEVPEGPRTWCMTRKPGA

SEQ ID NO: 3336 - protein, 718 aa, Artificial Sequence
  Synthetic Polypeptide
MALPVTALLLPLALLLHAARPDIQMTQSPSSLSASVGDRVTITCRASQGIRNNLAWYQQKPGKAPKRLIYAASNLQSGVPSRFTGSGSGTEFTLIVSSLQPEDFATYYCLQHHSYPLTSGGGTKVEGGGGSGGGGSGGGGSEVQVLESGGGLVQPGGSLRLSCAASGFTFSSYAMSWVRQAPGKGLEWVSAISGSGGSTNYADSVKGRFTISRDNSKNTLYLQMNSLRAEDTAVYYCAGSSGWSEYWGQGTLVTVSSTREQKLISEEDLAKPTTTPAPRPPTPAPTIASQPLSLRPEACRPAAGGAVHTRGLDFACDIYIWAPLAGTCGVLLLSLVITLYCKRGRKKLLYIFKQPFMRPVQTTQEEDGCSCRFPEEEEGGCELRVKFSRSADAPAYQQGQNQLYNELNLGRREEYDVLDKRRGRDPEMGGKPRRKNPQEGLYNELQKDKMAEAYSEIGMKGERRRGKGHDGLYQGLSTATKDTYDALHMQALPPRSSGSGEGRGSLLTCGDVEENPGPHMTEYKPTVRLATRDDVPRAVRTLAAAFADYPATRHTVDPDRHIERVTELQELFLTRVGLDIGKVWVADDGAAVAVWTTPESVEAGAVFAEIGPRMAELSGSRLAAQQQMEGLLAPHRPKEPAWFLATVGVSPDHQGKGLGSAVVLPGVEAAERAGVPAFLETSAPRNLPFYERLGFTVTADVEVPEGPRTWCMTRKPGA

SEQ ID NO: 3337 - protein, 724 aa, Artificial Sequence
  Synthetic Polypeptide
MALPVTALLLPLALLLHAARPDEIQLVQSGAEVKKPGESLRISCKGSGFNIEDYYIHWVRQMPGKGLEWMGRIDPENDETKYGPIFQGHVTISADTSINTVYLQWSSLKASDTAMYYCAFRGGVYWGQGTTVTVSSGGGGSGGGGSGGGGSDVVMTQSPDSLAVSLGERATINCKSSQSLLDSDGKTYLNWLQQKPGQPPKRLISLVSKLDSGVPDRFSGSGSGTDFTLTISSLQAEDVAVYYCWQGTHFPGTFGGGTKVEIKTREQKLISEEDLAKPTTTPAPRPPTPAPTIASQPLSLRPEACRPAAGGAVHTRGLDFACDIYIWAPLAGTCGVLLLSLVITLYCKRGRKKLLYIFKQPFMRPVQTTQEEDGCSCRFPEEEEGGCELRVKFSRSADAPAYQQGQNQLYNELNLGRREEYDVLDKRRGRDPEMGGKPRRKNPQEGLYNELQKDKMAEAYSEIGMKGERRRGKGHDGLYQGLSTATKDTYDALHMQALPPRSSGSGEGRGSLLTCGDVEENPGPHMTEYKPTVRLATRDDVPRAVRTLAAAFADYPATRHTVDPDRHIERVTELQELFLTRVGLDIGKVWVADDGAAVAVWTTPESVEAGAVFAEIGPRMAELSGSRLAAQQQMEGLLAPHRPKEPAWFLATVGVSPDHQGKGLGSAVVLPGVEAAERAGVPAFLETSAPRNLPFYERLGFTVTADVEVPEGPRTWCMTRKPGA

SEQ ID NO: 3338 - protein, 731 aa, Artificial Sequence
  Synthetic Polypeptide
MALPVTALLLPLALLLHAARPDELVMTQSPSSLTVTAGEKVTMSCKSSQSLLNSGNQKNYLTWYQQKPGQPPKLLIYWASTRESGVPDRFTGSGSGTDFTLTISSVQAEDLAVYYCQNDYSYPLTFGAGTKLEIKGGGGSGGGGSGGGGSEVQLLEQSGAELVRPGTSVKISCKASGYAFTNYWLGWVKQRPGHGLEWIGDIFPGSGNIHYNEKFKGKATLTADKSSSTAYMQLSSLTFEDSAVYFCARLRNWDEPMDYWGQGTTVTVSSTREQKLISEEDLAKPTTTPAPRPPTPAPTIASQPLSLRPEACRPAAGGAVHTRGLDFACDIYIWAPLAGTCGVLLLSLVITLYCKRGRKKLLYIFKQPFMRPVQTTQEEDGCSCRFPEEEEGGCELRVKFSRSADAPAYQQGQNQLYNELNLGRREEYDVLDKRRGRDPEMGGKPRRKNPQEGLYNELQKDKMAEAYSEIGMKGERRRGKGHDGLYQGLSTATKDTYDALHMQALPPRSSGSGEGRGSLLTCGDVEENPGPHMTEYKPTVRLATRDDVPRAVRTLAAAFADYPATRHTVDPDRHIERVTELQELFLTRVGLDIGKVWVADDGAAVAVWTTPESVEAGAVFAEIGPRMAELSGSRLAAQQQMEGLLAPHRPKEPAWFLATVGVSPDHQGKGLGSAVVLPGVEAAERAGVPAFLETSAPRNLPFYERLGFTVTADVEVPEGPRTWCMTRKPGA

SEQ ID NO: 3339 - protein, 732 aa, Artificial Sequence
  Synthetic Polypeptide
MALPVTALLLPLALLLHAARPDELQMTQSPSSLSASVGDRVTITCRASQSISSYLNWYQQKPGQPPKLLIYWASTRESGVPDRFSGSESGTNYTLTISSLQPEDFATYFCQQSDSLPITFGQGTRLDIQGGGGSGGGGSGGGGSEVQLLESGGGVVQPGRSLRLSCAASGFTFSSYGMHWVRQAPGKGLEWVAVISYDGSNKYYADSVKGRFTISRDNSKNTLYLQMNSLRAEDTAVYYCAKDMGWGSGWRPYYYYGMDVWGQGTTVTVSSTREQKLISEEDLAKPTTTPAPRPPTPAPTIASQPLSLRPEACRPAAGGAVHTRGLDFACDIYIWAPLAGTCGVLLLSLVITLYCKRGRKKLLYIFKQPFMRPVQTTQEEDGCSCRFPEEEEGGCELRVKFSRSADAPAYQQGQNQLYNELNLGRREEYDVLDKRRGRDPEMGGKPRRKNPQEGLYNELQKDKMAEAYSEIGMKGERRRGKGHDGLYQGLSTATKDTYDALHMQALPPRSSGSGEGRGSLLTCGDVEENPGPHMTEYKPTVRLATRDDVPRAVRTLAAAFADYPATRHTVDPDRHIERVTELQELFLTRVGLDIGKVWVADDGAAVAVWTTPESVEAGAVFAEIGPRMAELSGSRLAAQQQMEGLLAPHRPKEPAWFLATVGVSPDHQGKGLGSAVVLPGVEAAERAGVPAFLETSAPRNLPFYERLGFTVTADVEVPEGPRTWCMTRKPGA

SEQ ID NO: 3340 - protein, 729 aa, Artificial Sequence
  Synthetic Polypeptide
MALPVTALLLPLALLLHAARPDDIQMTQSPSSLSASVGDRVTITCRASQSISSYLNWYQQKPGKAPKLLIYAASSLQSGVPSRFSGSGSGTDFTLTISSLQPEDLATYYCQQSYSTPFTFGPGTKVDIKGGGGSGGGGSGGGGSVHEVQLVQSGAEVKKPGSSVKVSCKASGGTFSSYAISWVRQAPGQGLEWMGGIIPIFGTANYAQKFQGRVTITADKSTSTAYMELSSLRSEDTAVYYCATFALFGFREQAFDIWGQGTTVTVSSTREQKLISEEDLAKPTTTPAPRPPTPAPTIASQPLSLRPEACRPAAGGAVHTRGLDFACDIYIWAPLAGTCGVLLLSLVITLYCKRGRKKLLYIFKQPFMRPVQTTQEEDGCSCRFPEEEEGGCELRVKFSRSADAPAYQQGQNQLYNELNLGRREEYDVLDKRRGRDPEMGGKPRRKNPQEGLYNELQKDKMAEAYSEIGMKGERRRGKGHDGLYQGLSTATKDTYDALHMQALPPRSSGSGEGRGSLLTCGDVEENPGPHMTEYKPTVRLATRDDVPRAVRTLAAAFADYPATRHTVDPDRHIERVTELQELFLTRVGLDIGKVWVADDGAAVAVWTTPESVEAGAVFAEIGPRMAELSGSRLAAQQQMEGLLAPHRPKEPAWFLATVGVSPDHQGKGLGSAVVLPGVEAAERAGVPAFLETSAPRNLPFYERLGFTVTADVEVPEGPRTWCMTRKPGA

SEQ ID NO: 3341 - protein, 726 aa, Artificial Sequence
  Synthetic Polypeptide
MALPVTALLLPLALLLHAARPDVVMTQTPLSLPVSLGDQASISCRSSQSLVHSNGNTYLRWYLQKPGQSPKVLIYKVSNRFSGVPDRFSGSGSGTDFTLKISRVEAEDLGVYFCSQSTHVPWTFGGGTKLEIKGGGGSGGGGSGGGGSEVKLDETGGGLVQPGRPMKLSCVASGFTFSDYWMNWVRQSPEKGLEWVAQIRNKPYNYETYYSDSVKGRFTISRDDSKSSVYLQMNNLRVEDMGIYYCTGSYYGMDYWGQGTSVTVSTREQKLISEEDLAKPTTTPAPRPPTPAPTIASQPLSLRPEACRPAAGGAVHTRGLDFACDIYIWAPLAGTCGVLLLSLVITLYCKRGRKKLLYIFKQPFMRPVQTTQEEDGCSCRFPEEEEGGCELRVKFSRSADAPAYQQGQNQLYNELNLGRREEYDVLDKRRGRDPEMGGKPRRKNPQEGLYNELQKDKMAEAYSEIGMKGERRRGKGHDGLYQGLSTATKDTYDALHMQALPPRSSGSGEGRGSLLTCGDVEENPGPHMTEYKPTVRLATRDDVPRAVRTLAAAFADYPATRHTVDPDRHIERVTELQELFLTRVGLDIGKVWVADDGAAVAVWTTPESVEAGAVFAEIGPRMAELSGSRLAAQQQMEGLLAPHRPKEPAWFLATVGVSPDHQGKGLGSAVVLPGVEAAERAGVPAFLETSAPRNLPFYERLGFTVTADVEVPEGPRTWCMTRKPGA

SEQ ID NO: 3342 - protein, 737 aa, Artificial Sequence
  Synthetic Polypeptide
MALPVTALLLPLALLLHAARPDVVMTQTPLSLPVSLGDQASISCRSSQSLVHSNGNTYLRWYLQKPGQSPKVLIYKVSNRVSGVPDRFSGSGSGTDFTLKINRVEAEDLGVYFCSQSTHVPWTFGGGTKLEIKSSADDAKKDAAKKDDAKKDDAKKDGGVKLDETGGGLVQPGGAMKLSCVTSGFTFGHYWMNWVRQSPEKGLEWVAQFRNKPYNYETYYSDSVKGRFTISRDDSKSSVYLQMNNLRVEDTGIYYCTGASYGMEYLGQGTSVTVSTTREQKLISEEDLAKPTTTPAPRPPTPAPTIASQPLSLRPEACRPAAGGAVHTRGLDFACDIYIWAPLAGTCGVLLLSLVITLYCKRGRKKLLYIFKQPFMRPVQTTQEEDGCSCRFPEEEEGGCELRVKFSRSADAPAYQQGQNQLYNELNLGRREEYDVLDKRRGRDPEMGGKPRRKNPQEGLYNELQKDKMAEAYSEIGMKGERRRGKGHDGLYQGLSTATKDTYDALHMQALPPRSSGSGEGRGSLLTCGDVEENPGPHMTEYKPTVRLATRDDVPRAVRTLAAAFADYPATRHTVDPDRHIERVTELQELFLTRVGLDIGKVWVADDGAAVAVWTTPESVEAGAVFAEIGPRMAELSGSRLAAQQQMEGLLAPHRPKEPAWFLATVGVSPDHQGKGLGSAVVLPGVEAAERAGVPAFLETSAPRNLPFYERLGFTVTADVEVPEGPRTWCMTRKPGA

SEQ ID NO: 3343 - protein, 733 aa, Artificial Sequence
  Synthetic Polypeptide
MALPVTALLLPLALLLHAARPQVQLVESGGNLVQPGGSLRLSCAASGFTFGSFSMSWVRQAPGGGLEWVAGLSARSSLTHYADSVKGRFTISRDNAKNSVYLQMNSLRVEDTAVYYCARRSYDSSGYWGHFYSYMDVWGQGTLVTVSGGGGSGGGGSGGGGSSVLTQPSSVSAAPGQKVTISCSGSTSNIGNNYVSWYQQHPGKAPKLMIYDVSKRPSGVPDRFSGSKSGNSASLDISGLQSEDEADYYCAAWDDSLSEFLFGTGTKLTVLGTREQKLISEEDLAKPTTTPAPRPPTPAPTIASQPLSLRPEACRPAAGGAVHTRGLDFACDIYIWAPLAGTCGVLLLSLVITLYCKRGRKKLLYIFKQPFMRPVQTTQEEDGCSCRFPEEEEGGCELRVKFSRSADAPAYQQGQNQLYNELNLGRREEYDVLDKRRGRDPEMGGKPRRKNPQEGLYNELQKDKMAEAYSEIGMKGERRRGKGHDGLYQGLSTATKDTYDALHMQALPPRSSGSGEGRGSLLTCGDVEENPGPHMTEYKPTVRLATRDDVPRAVRTLAAAFADYPATRHTVDPDRHIERVTELQELFLTRVGLDIGKVWVADDGAAVAVWTTPESVEAGAVFAEIGPRMAELSGSRLAAQQQMEGLLAPHRPKEPAWFLATVGVSPDHQGKGLGSAVVLPGVEAAERAGVPAFLETSAPRNLPFYERLGFTVTADVEVPEGPRTWCMTRKPGA

SEQ ID NO: 3344 - protein, 728 aa, Artificial Sequence
  Synthetic Polypeptide
MALPVTALLLPLALLLHAARPDIQMTQSPSSLSASVGDRVTITCRTSQSLSSYTHWYQQKPGKAPKLLIYAASSRGSGVPSRFSGSGSGTDFTLTISSLQPEDFATYYCQQSRTFGQGTKVEIKGGGGSGGGGSGGGGSQVQLQQSGPGLVKPSQTLSLTCAISGDSVSSYNAVWNWIRQSPSRGLEWLGRTYYRSGWYNDYAESVKSRITINPDTSKNQFSLQLNSVTPEDTAVYYCARSGHITVFGVNVDAFDMWGQGTMVTVSSTREQKLISEEDLAKPTTTPAPRPPTPAPTIASQPLSLRPEACRPAAGGAVHTRGLDFACDIYIWAPLAGTCGVLLLSLVITLYCKRGRKKLLYIFKQPFMRPVQTTQEEDGCSCRFPEEEEGGCELRVKFSRSADAPAYQQGQNQLYNELNLGRREEYDVLDKRRGRDPEMGGKPRRKNPQEGLYNELQKDKMAEAYSEIGMKGERRRGKGHDGLYQGLSTATKDTYDALHMQALPPRSSGSGEGRGSLLTCGDVEENPGPHMTEYKPTVRLATRDDVPRAVRTLAAAFADYPATRHTVDPDRHIERVTELQELFLTRVGLDIGKVWVADDGAAVAVWTTPESVEAGAVFAEIGPRMAELSGSRLAAQQQMEGLLAPHRPKEPAWFLATVGVSPDHQGKGLGSAVVLPGVEAAERAGVPAFLETSAPRNLPFYERLGFTVTADVEVPEGPRTWCMTRKPGA

SEQ ID NO: 3345 - protein, 727 aa, Artificial Sequence
  Synthetic Polypeptide
MALPVTALLLPLALLLHAARPDIVLTQSPLSLAVSLGQPAIISCKASQSVSFAGTSLMHWYHQKPGQQPRLLIYRASNLEAGVPDRFSGSGSKTDFTLTISPVEAEDAATYYCQQSREYPYTFGGGTKLEIKRGGGGSGGGGSGGGGSQVQLVQSGAEVVKPGASVKISCKASGYTFTGYFMNWVKQSPGQSLEWIGRIHPYDGDTFYNQKFQGKATLTVDKSSNTAHMELLSLTSEDFAVYYCTRYDGSRAMDYWGQGTTVTVSSTREQKLISEEDLAKPTTTPAPRPPTPAPTIASQPLSLRPEACRPAAGGAVHTRGLDFACDIYIWAPLAGTCGVLLLSLVITLYCKRGRKKLLYIFKQPFMRPVQTTQEEDGCSCRFPEEEEGGCELRVKFSRSADAPAYQQGQNQLYNELNLGRREEYDVLDKRRGRDPEMGGKPRRKNPQEGLYNELQKDKMAEAYSEIGMKGERRRGKGHDGLYQGLSTATKDTYDALHMQALPPRSSGSGEGRGSLLTCGDVEENPGPHMTEYKPTVRLATRDDVPRAVRTLAAAFADYPATRHTVDPDRHIERVTELQELFLTRVGLDIGKVWVADDGAAVAVWTTPESVEAGAVFAEIGPRMAELSGSRLAAQQQMEGLLAPHRPKEPAWFLATVGVSPDHQGKGLGSAVVLPGVEAAERAGVPAFLETSAPRNLPFYERLGFTVTADVEVPEGPRTWCMTRKPGA

SEQ ID NO: 3346 - protein, 700 aa, Artificial Sequence
  Synthetic Polypeptide
MALPVTALLLPLALLLHAARPNSCELTNITIAIEKEECRFCISINTTWCAGYCYTRDLVYKDPARPKIQKTCTFKELVYETVRVPGCAHHADSLYTYPVATQCHCGKCDSDSTDCTVRGLGPSYCSFGEMKEGGGGSGGGGSGGGGSAPDVQDCPECTLQENPFFSQPGAPILQCMGCCFSRAYPTPLRSKKTMLVQKNVTSESTCCVAKSYNRVTVMGGFKVENHTACHCSTCYYHKSTREQKLISEEDLAKPTTTPAPRPPTPAPTIASQPLSLRPEACRPAAGGAVHTRGLDFACDIYIWAPLAGTCGVLLLSLVITLYCKRGRKKLLYIFKQPFMRPVQTTQEEDGCSCRFPEEEEGGCELRVKFSRSADAPAYQQGQNQLYNELNLGRREEYDVLDKRRGRDPEMGGKPRRKNPQEGLYNELQKDKMAEAYSEIGMKGERRRGKGHDGLYQGLSTATKDTYDALHMQALPPRSSGSGEGRGSLLTCGDVEENPGPHMTEYKPTVRLATRDDVPRAVRTLAAAFADYPATRHTVDPDRHIERVTELQELFLTRVGLDIGKVWVADDGAAVAVWTTPESVEAGAVFAEIGPRMAELSGSRLAAQQQMEGLLAPHRPKEPAWFLATVGVSPDHQGKGLGSAVVLPGVEAAERAGVPAFLETSAPRNLPFYERLGFTVTADVEVPEGPRTWCMTRKPGA

SEQ ID NO: 3347 - protein, 731 aa, Artificial Sequence
  Synthetic Polypeptide
MALPVTALLLPLALLLHAARPDLETTLTQSPATLSVSPGERVTLSCRASQSVGSNLAWYQQKFGQAPRLLIYDASTRATGIPARFSGSGSGTEFTLTISRLEPEDFAVYYCHQYGSSPRTFGQGTKVDIKRGGGGSGGGGSGGGGSQVQLVQSGAEVKKPGASVKVSCKASGYTFTTYGISWVRQAPGQGLEWMGWISAYNGHTNYAQMLQGRVTMTTDTSTSTAYMELRGLRSDDTAVYYCAREAYASYGSGSYWTDYWGQGTLVTVSSTREQKLISEEDLAKPTTTPAPRPPTPAPTIASQPLSLRPEACRPAAGGAVHTRGLDFACDIYIWAPLAGTCGVLLLSLVITLYCKRGRKKLLYIFKQPFMRPVQTTQEEDGCSCRFPEEEEGGCELRVKFSRSADAPAYQQGQNQLYNELNLGRREEYDVLDKRRGRDPEMGGKPRRKNPQEGLYNELQKDKMAEAYSEIGMKGERRRGKGHDGLYQGLSTATKDTYDALHMQALPPRSSGSGEGRGSLLTCGDVEENPGPHMTEYKPTVRLATRDDVPRAVRTLAAAFADYPATRHTVDPDRHIERVTELQELFLTRVGLDIGKVWVADDGAAVAVWTTPESVEAGAVFAEIGPRMAELSGSRLAAQQQMEGLLAPHRPKEPAWFLATVGVSPDHQGKGLGSAVVLPGVEAAERAGVPAFLETSAPRNLPFYERLGFTVTADVEVPEGPRTWCMTRKPGA

SEQ ID NO: 3348 - protein, 724 aa, Artificial Sequence
  Synthetic Polypeptide
MALPVTALLLPLALLLHAARPDDVVMTQTPLSLPVTPGEPASISCRSSQSLVHRNGNTYLHWYLQKPGQSPKLLIHKVSNRFSGVPDRFSGSGSGTDFTLKISRVEAEDLGVYFCSQSTHVPPLTFGAGTKLELKGGGGSGGGGSGGGGSEVQLVQSGAEVEKPGASVKISCKASGSSFTGYNMNWVRQNIGKSLEWIGAIDPYYGGTSYNQKFKGRATLTVDKSTSTAYMHLKSLRSEDTAVYYCVSGMEYWGQGTSVTVSSTREQKLISEEDLAKPTTTPAPRPPTPAPTIASQPLSLRPEACRPAAGGAVHTRGLDFACDIYIWAPLAGTCGVLLLSLVITLYCKRGRKKLLYIFKQPFMRPVQTTQEEDGCSCRFPEEEEGGCELRVKFSRSADAPAYQQGQNQLYNELNLGRREEYDVLDKRRGRDPEMGGKPRRKNPQEGLYNELQKDKMAEAYSEIGMKGERRRGKGHDGLYQGLSTATKDTYDALHMQALPPRSSGSGEGRGSLLTCGDVEENPGPHMTEYKPTVRLATRDDVPRAVRTLAAAFADYPATRHTVDPDRHIERVTELQELFLTRVGLDIGKVWVADDGAAVAVWTTPESVEAGAVFAEIGPRMAELSGSRLAAQQQMEGLLAPHRPKEPAWFLATVGVSPDHQGKGLGSAVVLPGVEAAERAGVPAFLETSAPRNLPFYERLGFTVTADVEVPEGPRTWCMTRKPGA

SEQ ID NO: 3349 - protein, 722 aa, Artificial Sequence
  Synthetic Polypeptide
MALPVTALLLPLALLLHAARPDEIVMTQTPATLSVSAGERVTITCKASQSVSNDVTWYQQKPGQAPRLLIYSASNRYSGVPARFSGSGYGTEFTFTISSVQSEDFAVYFCQQDYSSFGQGTKLEIKRGGGGSGGGGSGGGGSQVQLVESGPGVVQPGRSLRISCAVSGFSVTNYGVHWVRQPPGKGLEWLGVIWAGGITNYNSAFMSRLTISKDNSKNTVYLQMNSLRAEDTAMYYCASRGGHYGYALDYWGQGTLVTVSSTREQKLISEEDLAKPTTTPAPRPPTPAPTIASQPLSLRPEACRPAAGGAVHTRGLDFACDIYIWAPLAGTCGVLLLSLVITLYCKRGRKKLLYIFKQPFMRPVQTTQEEDGCSCRFPEEEEGGCELRVKFSRSADAPAYQQGQNQLYNELNLGRREEYDVLDKRRGRDPEMGGKPRRKNPQEGLYNELQKDKMAEAYSEIGMKGERRRGKGHDGLYQGLSTATKDTYDALHMQALPPRSSGSGEGRGSLLTCGDVEENPGPHMTEYKPTVRLATRDDVPRAVRTLAAAFADYPATRHTVDPDRHIERVTELQELFLTRVGLDIGKVWVADDGAAVAVWTTPESVEAGAVFAEIGPRMAELSGSRLAAQQQMEGLLAPHRPKEPAWFLATVGVSPDHQGKGLGSAVVLPGVEAAERAGVPAFLETSAPRNLPFYERLGFTVTADVEVPEGPRTWCMTRKPGA

SEQ ID NO: 3350 - protein, 724 aa, Artificial Sequence
  Synthetic Polypeptide
MALPVTALLLPLALLLHAARPDIQMTQTASSLPASLGDRVTISCSASQDISNYLNWYQQKPDGTVKLLIFYSSNLHSGVPSRFSGGGSGTDYSLTISNLEPEDIATYFCHQYSKLPWTFGGGTKLEIKRGGGGSGGGGSGGGGSEVTLVESGGDFVKPGGSLKVSCAASGFAFSHYAMSWVRQTPAKRLEWVAYISSGGSGTYYSDSVKGRFTISRDNAKNTLYLQMRSLRSEDSAMYFCTRVKLGTYYFDSWGQGTTLTVSSTREQKLISEEDLAKPTTTPAPRPPTPAPTIASQPLSLRPEACRPAAGGAVHTRGLDFACDIYIWAPLAGTCGVLLLSLVITLYCKRGRKKLLYIFKQPFMRPVQTTQEEDGCSCRFPEEEEGGCELRVKFSRSADAPAYQQGQNQLYNELNLGRREEYDVLDKRRGRDPEMGGKPRRKNPQEGLYNELQKDKMAEAYSEIGMKGERRRGKGHDGLYQGLSTATKDTYDALHMQALPPRSSGSGEGRGSLLTCGDVEENPGPHMTEYKPTVRLATRDDVPRAVRTLAAAFADYPATRHTVDPDRHIERVTELQELFLTRVGLDIGKVWVADDGAAVAVWTTPESVEAGAVFAEIGPRMAELSGSRLAAQQQMEGLLAPHRPKEPAWFLATVGVSPDHQGKGLGSAVVLPGVEAAERAGVPAFLETSAPRNLPFYERLGFTVTADVEVPEGPRTWCMTRKPGA

SEQ ID NO: 3351 - protein, 726 aa, Artificial Sequence
  Synthetic Polypeptide
MALPVTALLLPLALLLHAARPQFVLTQSPSASAALGASAKLTCTLSSAHKTYTIDWYQQQKGKAPRYLIQVKSDGTYTKATGVPDRFSGSSSGADRYLIIPSVQADDEADYYCGTDYTGGYVFGGGTQLTVTGGGGSGGGGSGGGGSEQLKESGGGLFKPTDTLTLTCTVSGFSLSYYGVNWVRQAPGNGLEWIGTIGGSGDTYYASWAKSRSTIIRNTNENTVTLKMTSLTAADTATYFCVRYANIGYEYFNVWGPGTLVTVSSTREQKLISEEDLAKPTTTPAPRPPTPAPTIASQPLSLRPEACRPAAGGAVHTRGLDFACDIYIWAPLAGTCGVLLLSLVITLYCKRGRKKLLYIFKQPFMRPVQTTQEEDGCSCRFPEEEEGGCELRVKFSRSADAPAYQQGQNQLYNELNLGRREEYDVLDKRRGRDPEMGGKPRRKNPQEGLYNELQKDKMAEAYSEIGMKGERRRGKGHDGLYQGLSTATKDTYDALHMQALPPRSSGSGEGRGSLLTCGDVEENPGPHMTEYKPTVRLATRDDVPRAVRTLAAAFADYPATRHTVDPDRHIERVTELQELFLTRVGLDIGKVWVADDGAAVAVWTTPESVEAGAVFAEIGPRMAELSGSRLAAQQQMEGLLAPHRPKEPAWFLATVGVSPDHQGKGLGSAVVLPGVEAAERAGVPAFLETSAPRNLPFYERLGFTVTADVEVPEGPRTWCMTRKPGA

SEQ ID NO: 3352 - protein, 731 aa, Artificial Sequence
  Synthetic Polypeptide
MALPVTALLLPLALLLHAARPQFVLTQSPSVSAALGASAKLTCTLSSAHKTYTIDWYQQQQGEAPRYLMQVKSDGSYTKGTGVPDRFSGSSSGADRYLIIPSVQADDEAGYVCGADDNGGYVFGGGTQLTVTGGGGSGGGGSGGGGSQSVKESEGGLFKPTDTLTLTCTVSGFSLSRHALTWVRQAPGNGLEWIGAIDNAGTTYYASWAKSRSTITRNTDLHTVTLKMTSLTASDTATYFCARVFYDINSGYYLDGMDLWGPGTLVTVSSTREQKLISEEDLAKPTTTPAPRPPTPAPTIASQPLSLRPEACRPAAGGAVHTRGLDFACDIYIWAPLAGTCGVLLLSLVITLYCKRGRKKLLYIFKQPFMRPVQTTQEEDGCSCRFPEEEEGGCELRVKFSRSADAPAYQQGQNQLYNELNLGRREEYDVLDKRRGRDPEMGGKPRRKNPQEGLYNELQKDKMAEAYSEIGMKGERRRGKGHDGLYQGLSTATKDTYDALHMQALPPRSSGSGEGRGSLLTCGDVEENPGPHMTEYKPTVRLATRDDVPRAVRTLAAAFADYPATRHTVDPDRHIERVTELQELFLTRVGLDIGKVWVADDGAAVAVWTTPESVEAGAVFAEIGPRMAELSGSRLAAQQQMEGLLAPHRPKEPAWFLATVGVSPDHQGKGLGSAVVLPGVEAAERAGVPAFLETSAPRNLPFYERLGFTVTADVEVPEGPRTWCMTRKPGA

SEQ ID NO: 3353 - protein, 725 aa, Artificial Sequence
  Synthetic Polypeptide
MALPVTALLLPLALLLHAARPDIQMTQSPSSLSASVGDRVTITCRASQGISSWLAWYQQKPEKAPKSLIYAASSLQSGVPSRFSGSGSGTDFTLTISSLQPEDFATYYCQQYNSYPPTFGGGTKVEIKGGGGSGGGGSGGGGSEVQLVESGGGLVQPGESLRLSCVASGFTFSRYKMNWVRQAPGKGLEWVSYISRSGRDIYYADSVKGRFTISRDNAKNSLYLQMNSLRDEDTAVYYCAGTVTTYYYFGMDVWGHGTTVTVSSTREQKLISEEDLAKPTTTPAPRPPTPAPTIASQPLSLRPEACRPAAGGAVHTRGLDFACDIYIWAPLAGTCGVLLLSLVITLYCKRGRKKLLYIFKQPFMRPVQTTQEEDGCSCRFPEEEEGGCELRVKFSRSADAPAYQQGQNQLYNELNLGRREEYDVLDKRRGRDPEMGGKPRRKNPQEGLYNELQKDKMAEAYSEIGMKGERRRGKGHDGLYQGLSTATKDTYDALHMQALPPRSSGSGEGRGSLLTCGDVEENPGPHMTEYKPTVRLATRDDVPRAVRTLAAAFADYPATRHTVDPDRHIERVTELQELFLTRVGLDIGKVWVADDGAAVAVWTTPESVEAGAVFAEIGPRMAELSGSRLAAQQQMEGLLAPHRPKEPAWFLATVGVSPDHQGKGLGSAVVLPGVEAAERAGVPAFLETSAPRNLPFYERLGFTVTADVEVPEGPRTWCMTRKPGA

SEQ ID NO: 3354 - protein, 726 aa, Artificial Sequence
  Synthetic Polypeptide
MALPVTALLLPLALLLHAARPDIQMTQSPSSLSASVGDRVTITCRASQGISSWLAWYQQKPEKAPKSLIYAASSLQSGVPSRFSGSGSGTDFTLTISSLQPEDFATYYCQQYNSYPPTFGGGTKVEIKGGGGSGGGGSGGGGSEVQLVESGGGSVQPGESLRLSCVASGFTFSRYKMNWVRQAPGKGLEWVSYISRSGRDIYYADSVKGRFTISRDNAKNSLYLQMNSLRDEDTAVYYCAGTVTTYYYDFGMDVWGQGTTVTVSSTREQKLISEEDLAKPTTTPAPRPPTPAPTIASQPLSLRPEACRPAAGGAVHTRGLDFACDIYIWAPLAGTCGVLLLSLVITLYCKRGRKKLLYIFKQPFMRPVQTTQEEDGCSCRFPEEEEGGCELRVKFSRSADAPAYQQGQNQLYNELNLGRREEYDVLDKRRGRDPEMGGKPRRKNPQEGLYNELQKDKMAEAYSEIGMKGERRRGKGHDGLYQGLSTATKDTYDALHMQALPPRSSGSGEGRGSLLTCGDVEENPGPHMTEYKPTVRLATRDDVPRAVRTLAAAFADYPATRHTVDPDRHIERVTELQELFLTRVGLDIGKVWVADDGAAVAVWTTPESVEAGAVFAEIGPRMAELSGSRLAAQQQMEGLLAPHRPKEPAWFLATVGVSPDHQGKGLGSAVVLPGVEAAERAGVPAFLETSAPRNLPFYERLGFTVTADVEVPEGPRTWCMTRKPGA

SEQ ID NO: 3355 - protein, 725 aa, Artificial Sequence
  Synthetic Polypeptide
MALPVTALLLPLALLLHAARPQSVLTQPPSASGTPGQRVTISCSGSRSNVGGNYVFWYQQVPGATPKLLIYRSNQRPSGVPDRFAGSKSGSSASLAISGLRSEDEADYYCATWDDSLSGFVFGTGTKVTVLGGGGGSGGGGSGGGGSEVQLVESGGGLVKPGGSLRLSCAASGFTFSDYYMSWIRQAPGKGLEWVSYISSSGSTIYYADSVKGRFTISRDNAKNSLYLQMNSLRAEDTAVYYCARGYGKAYDQWGQGTLVTVSSTREQKLISEEDLAKPTTTPAPRPPTPAPTIASQPLSLRPEACRPAAGGAVHTRGLDFACDIYIWAPLAGTCGVLLLSLVITLYCKRGRKKLLYIFKQPFMRPVQTTQEEDGCSCRFPEEEEGGCELRVKFSRSADAPAYQQGQNQLYNELNLGRREEYDVLDKRRGRDPEMGGKPRRKNPQEGLYNELQKDKMAEAYSEIGMKGERRRGKGHDGLYQGLSTATKDTYDALHMQALPPRSSGSGEGRGSLLTCGDVEENPGPHMTEYKPTVRLATRDDVPRAVRTLAAAFADYPATRHTVDPDRHIERVTELQELFLTRVGLDIGKVWVADDGAAVAVWTTPESVEAGAVFAEIGPRMAELSGSRLAAQQQMEGLLAPHRPKEPAWFLATVGVSPDHQGKGLGSAVVLPGVEAAERAGVPAFLETSAPRNLPFYERLGFTVTADVEVPEGPRTWCMTRKPGA

SEQ ID NO: 3356 - protein, 724 aa, Artificial Sequence
  Synthetic Polypeptide
MALPVTALLLPLALLLHAARPQSVVTQPPSMSAAPGQQVTISCSGGNSNIERNYVSWYLQLPGTAPKLVIFDNDRRPSGIPDRFSGSKSGTSATLGITGLQTGDEADYYCGTWDSSLRGWVFGGGTKLTVLGGGGGSGGGGSGGGGSEVQLVESGGGLIQPGGSLRLSCAASGFTFSNYAMNWVRQAPGKGLEWVSTINGRGSSTIYADSVKGRFTISRDNSKNTLYLQMNSLRAEDTATYYCARYISRGLGDSWGQGTLVTVTREQKLISEEDLAKPTTTPAPRPPTPAPTIASQPLSLRPEACRPAAGGAVHTRGLDFACDIYIWAPLAGTCGVLLLSLVITLYCKRGRKKLLYIFKQPFMRPVQTTQEEDGCSCRFPEEEEGGCELRVKFSRSADAPAYQQGQNQLYNELNLGRREEYDVLDKRRGRDPEMGGKPRRKNPQEGLYNELQKDKMAEAYSEIGMKGERRRGKGHDGLYQGLSTATKDTYDALHMQALPPRSSGSGEGRGSLLTCGDVEENPGPHMTEYKPTVRLATRDDVPRAVRTLAAAFADYPATRHTVDPDRHIERVTELQELFLTRVGLDIGKVWVADDGAAVAVWTTPESVEAGAVFAEIGPRMAELSGSRLAAQQQMEGLLAPHRPKEPAWFLATVGVSPDHQGKGLGSAVVLPGVEAAERAGVPAFLETSAPRNLPFYERLGFTVTADVEVPEGPRTWCMTRKPGA

SEQ ID NO: 3357 - protein, 724 aa, Artificial Sequence
  Synthetic Polypeptide
MALPVTALLLPLALLLHAARPQSVVTQPPSVSGAPGQRVTISCTGSSSNIGAGYDVHWYQQLPGTAPKLLIYGNSNRPSGVPDRFSGSKSGTSASLAITGLQAEDEADYYCQSYDSSLSGSYVFGTGTKLTVLGGGGGSGGGGSGGGGSEVQLVETGGNLVQPGASLRLSCAASGFSFSGTAMHWVRQAPGKGLEWVSTISSTGRSTYYRDSVKGRFTISRDNSKNTLYLQMNSLRGEDTAVYYCARVSFDYWGQGTLVTVSSTREQKLISEEDLAKPTTTPAPRPPTPAPTIASQPLSLRPEACRPAAGGAVHTRGLDFACDIYIWAPLAGTCGVLLLSLVITLYCKRGRKKLLYIFKQPFMRPVQTTQEEDGCSCRFPEEEEGGCELRVKFSRSADAPAYQQGQNQLYNELNLGRREEYDVLDKRRGRDPEMGGKPRRKNPQEGLYNELQKDKMAEAYSEIGMKGERRRGKGHDGLYQGLSTATKDTYDALHMQALPPRSSGSGEGRGSLLTCGDVEENPGPHMTEYKPTVRLATRDDVPRAVRTLAAAFADYPATRHTVDPDRHIERVTELQELFLTRVGLDIGKVWVADDGAAVAVWTTPESVEAGAVFAEIGPRMAELSGSRLAAQQQMEGLLAPHRPKEPAWFLATVGVSPDHQGKGLGSAVVLPGVEAAERAGVPAFLETSAPRNLPFYERLGFTVTADVEVPEGPRTWCMTRKPGA

SEQ ID NO: 3358 - protein, 726 aa, Artificial Sequence
  Synthetic Polypeptide
MALPVTALLLPLALLLHAARPQSVVTQPASVSGSPGQSITISCTGTSSDVGGYNYVSWYQQHPGKAPKLMIYDVSKRPSGVSNRFSGSKSGNTASLTISGLQAEDEADYYCSSYTSSSTLVFGGGTKLTVLGGGGGSGGGGSGGGGSEVQLVESGGAFVQPGGSLRLSCAASGFTFSSYAMTWVRQAPGKGLEWVSTISGRGRSTFYADSVKGRFTISRDNSKNTLYLQMNSLRAEDTAVYYCARYYHAGAFDLWGQGTLVTVSSTREQKLISEEDLAKPTTTPAPRPPTPAPTIASQPLSLRPEACRPAAGGAVHTRGLDFACDIYIWAPLAGTCGVLLLSLVITLYCKRGRKKLLYIFKQPFMRPVQTTQEEDGCSCRFPEEEEGGCELRVKFSRSADAPAYQQGQNQLYNELNLGRREEYDVLDKRRGRDPEMGGKPRRKNPQEGLYNELQKDKMAEAYSEIGMKGERRRGKGHDGLYQGLSTATKDTYDALHMQALPPRSSGSGEGRGSLLTCGDVEENPGPHMTEYKPTVRLATRDDVPRAVRTLAAAFADYPATRHTVDPDRHIERVTELQELFLTRVGLDIGKVWVADDGAAVAVWTTPESVEAGAVFAEIGPRMAELSGSRLAAQQQMEGLLAPHRPKEPAWFLATVGVSPDHQGKGLGSAVVLPGVEAAERAGVPAFLETSAPRNLPFYERLGFTVTADVEVPEGPRTWCMTRKPGA

SEQ ID NO: 3359 - protein, 724 aa, Artificial Sequence
  Synthetic Polypeptide
MALPVTALLLPLALLLHAARPDNIELTQSPAIMSASPGERVTMTCSASSSIRYIYWYQQKPGSSPRLLIYDTSNVAPGVPFRFSGSGSGTSYSLTINRMEAEDAATYYCQEWSGYPYTFGGGTKLDIKRGGGGSGGGGSGGGGSQVKLQESGGGLVKPGGSLKLSCAASGFTFSSYGMSWVRQTPDKRLEWVATISSGGSYTYYPDSVKGRFTISRDNAKNTLYLQMSSLKSEDTAMYYCARGNWEGWYFDVWGQGTTVTVSSTREQKLISEEDLAKPTTTPAPRPPTPAPTIASQPLSLRPEACRPAAGGAVHTRGLDFACDIYIWAPLAGTCGVLLLSLVITLYCKRGRKKLLYIFKQPFMRPVQTTQEEDGCSCRFPEEEEGGCELRVKFSRSADAPAYQQGQNQLYNELNLGRREEYDVLDKRRGRDPEMGGKPRRKNPQEGLYNELQKDKMAEAYSEIGMKGERRRGKGHDGLYQGLSTATKDTYDALHMQALPPRSSGSGEGRGSLLTCGDVEENPGPHMTEYKPTVRLATRDDVPRAVRTLAAAFADYPATRHTVDPDRHIERVTELQELFLTRVGLDIGKVWVADDGAAVAVWTTPESVEAGAVFAEIGPRMAELSGSRLAAQQQMEGLLAPHRPKEPAWFLATVGVSPDHQGKGLGSAVVLPGVEAAERAGVPAFLETSAPRNLPFYERLGFTVTADVEVPEGPRTWCMTRKPGA

SEQ ID NO: 3360 - protein, 734 aa, Artificial Sequence
  Synthetic Polypeptide
MALPVTALLLPLALLLHAARPDNFMLTQPHSVSESPGKTVTISCTGSGGSIDNNYVHWYQQRPGSAPTTVMFEDNQRPSGVPDRFSGSIDSSSNSASLVISGLKTEDEGDYYCQSSDGSKVVFGGGTKLTVLGQGGGGSGGGGSGGGGSEVQLVQSGGGSLTLSCAASGVVQPGRFTFSSYGMHWVRQAPGKGLEWVSVISYDGSNKYYADSVKGRFTISRDNSKNTLYLQMNSLRTEDTAVYYCAKTLSAGEWIGGGAFDIWGHGTMVTVSSTREQKLISEEDLAKPTTTPAPRPPTPAPTIASQPLSLRPEACRPAAGGAVHTRGLDFACDIYIWAPLAGTCGVLLLSLVITLYCKRGRKKLLYIFKQPFMRPVQTTQEEDGCSCRFPEEEEGGCELRVKFSRSADAPAYQQGQNQLYNELNLGRREEYDVLDKRRGRDPEMGGKPRRKNPQEGLYNELQKDKMAEAYSEIGMKGERRRGKGHDGLYQGLSTATKDTYDALHMQALPPRSSGSGEGRGSLLTCGDVEENPGPHMTEYKPTVRLATRDDVPRAVRTLAAAFADYPATRHTVDPDRHIERVTELQELFLTRVGLDIGKVWVADDGAAVAVWTTPESVEAGAVFAEIGPRMAELSGSRLAAQQQMEGLLAPHRPKEPAWFLATVGVSPDHQGKGLGSAVVLPGVEAAERAGVPAFLETSAPRNLPFYERLGFTVTADVEVPEGPRTWCMTRKPGA

SEQ ID NO: 3361 - protein, 724 aa, Artificial Sequence
  Synthetic Polypeptide
MALPVTALLLPLALLLHAARPDVVMTQTPLSLPVSLGDQASISCRSSQSLVHSNGNTYLHWYLQKPGQSPKLLIYKVSNRFSGVPDRFSGSGSGTDFTLKISRVEAEDLGVYFCSQNTPVPPKFGSGTKLEIKGGGGSGGGGSGGGGSQVQLQQSGAELVRPGASVKLSCKASGYTFNDYEMHWVKQTPVHGLKWIGALEPKTGDTAYSQKFKGKATLTADKSSSTAYMELRSLTSEDSAVYYCTSCYYYTYSGQGTLVTVSATREQKLISEEDLAKPTTTPAPRPPTPAPTIASQPLSLRPEACRPAAGGAVHTRGLDFACDIYIWAPLAGTCGVLLLSLVITLYCKRGRKKLLYIFKQPFMRPVQTTQEEDGCSCRFPEEEEGGCELRVKFSRSADAPAYQQGQNQLYNELNLGRREEYDVLDKRRGRDPEMGGKPRRKNPQEGLYNELQKDKMAEAYSEIGMKGERRRGKGHDGLYQGLSTATKDTYDALHMQALPPRSSGSGEGRGSLLTCGDVEENPGPHMTEYKPTVRLATRDDVPRAVRTLAAAFADYPATRHTVDPDRHIERVTELQELFLTRVGLDIGKVWVADDGAAVAVWTTPESVEAGAVFAEIGPRMAELSGSRLAAQQQMEGLLAPHRPKEPAWFLATVGVSPDHQGKGLGSAVVLPGVEAAERAGVPAFLETSAPRNLPFYERLGFTVTADVEVPEGPRTWCMTRKPGA

SEQ ID NO: 3362 - protein, 723 aa, Artificial Sequence
  Synthetic Polypeptide
MALPVTALLLPLALLLHAARPDIQLTQSPSSLSASVGDRVTITCRASQGIRNDLGWYQQKPGKAPKRLIYAASSLQNGVPSRFSGSGSGTEFTLTISSLQPEDFATYYCLQHNTYPAFGQGTKVEIKRGGGGSGGGGSGGGGSQVQLQESGPGLVKPSQTLSLTCTVSGGSISSFNYYWSWIRHHPGKGLEWIGYIYYSGSTYSNPSLKSRVTISVDTSKNQFSLTLSSVTAADTAVYYCARGYNWNYFDYWGQGTLVTVSSTREQKLISEEDLAKPTTTPAPRPPTPAPTIASQPLSLRPEACRPAAGGAVHTRGLDFACDIYIWAPLAGTCGVLLLSLVITLYCKRGRKKLLYIFKQPFMRPVQTTQEEDGCSCRFPEEEEGGCELRVKFSRSADAPAYQQGQNQLYNELNLGRREEYDVLDKRRGRDPEMGGKPRRKNPQEGLYNELQKDKMAEAYSEIGMKGERRRGKGHDGLYQGLSTATKDTYDALHMQALPPRSSGSGEGRGSLLTCGDVEENPGPHMTEYKPTVRLATRDDVPRAVRTLAAAFADYPATRHTVDPDRHIERVTELQELFLTRVGLDIGKVWVADDGAAVAVWTTPESVEAGAVFAEIGPRMAELSGSRLAAQQQMEGLLAPHRPKEPAWFLATVGVSPDHQGKGLGSAVVLPGVEAAERAGVPAFLETSAPRNLPFYERLGFTVTADVEVPEGPRTWCMTRKPGA

SEQ ID NO: 3363 - protein, 725 aa, Artificial Sequence
  Synthetic Polypeptide
MALPVTALLLPLALLLHAARPDDIVLTQSPASLAVSLGQSVTISCRASESVEYYGTSLMQWYQQKPGQPPKLLIYATSNVESGVPARFSGSGSGTDFSLNIHPVEEDDIAMYFCQQSRKLPSTFGGGTKLEIKGGGGSGGGGSGGGGSDVRLQESGPGQVKPSQTVSLTCSVTGYSITNGNHWWNWIRQVSGSKLEWIGYISSSGSTDSNPSLKSRISITRDTSKNQLFLQLNSVTTEDIATYYCARGYYFDYWGQGTTLTVSSTREQKLISEEDLAKPTTTPAPRPPTPAPTIASQPLSLRPEACRPAAGGAVHTRGLDFACDIYIWAPLAGTCGVLLLSLVITLYCKRGRKKLLYIFKQPFMRPVQTTQEEDGCSCRFPEEEEGGCELRVKFSRSADAPAYQQGQNQLYNELNLGRREEYDVLDKRRGRDPEMGGKPRRKNPQEGLYNELQKDKMAEAYSEIGMKGERRRGKGHDGLYQGLSTATKDTYDALHMQALPPRSSGSGEGRGSLLTCGDVEENPGPHMTEYKPTVRLATRDDVPRAVRTLAAAFADYPATRHTVDPDRHIERVTELQELFLTRVGLDIGKVWVADDGAAVAVWTTPESVEAGAVFAEIGPRMAELSGSRLAAQQQMEGLLAPHRPKEPAWFLATVGVSPDHQGKGLGSAVVLPGVEAAERAGVPAFLETSAPRNLPFYERLGFTVTADVEVPEGPRTWCMTRKPGA

SEQ ID NO: 3364 - protein, 603 aa, Artificial Sequence
  Synthetic Polypeptide
MALPVTALLLPLALLLHAARPDEFEVQLVESGGGLVQAGGSLRLSCAASGITFSINTMGWYRQAPGKQRELVALISSIGDTYYADSVKGRFTISRDNAKNTVYLQMNSLKPEDTAVYYCKRFRTAAQGTDYWGQGTQVTVSSTREQKLISEEDLAKPTTTPAPRPPTPAPTIASQPLSLRPEACRPAAGGAVHTRGLDFACDIYIWAPLAGTCGVLLLSLVITLYCKRGRKKLLYIFKQPFMRPVQTTQEEDGCSCRFPEEEEGGCELRVKFSRSADAPAYQQGQNQLYNELNLGRREEYDVLDKRRGRDPEMGGKPRRKNPQEGLYNELQKDKMAEAYSEIGMKGERRRGKGHDGLYQGLSTATKDTYDALHMQALPPRSSGSGEGRGSLLTCGDVEENPGPHMTEYKPTVRLATRDDVPRAVRTLAAAFADYPATRHTVDPDRHIERVTELQELFLTRVGLDIGKVWVADDGAAVAVWTTPESVEAGAVFAEIGPRMAELSGSRLAAQQQMEGLLAPHRPKEPAWFLATVGVSPDHQGKGLGSAVVLPGVEAAERAGVPAFLETSAPRNLPFYERLGFTVTADVEVPEGPRTWCMTRKPGA

SEQ ID NO: 3365 - protein, 538 aa, Artificial Sequence
  Synthetic Polypeptide
MDWIWRILFLVGAATGAHSFEGSGFEYAKEMRNAYWEIALLPNLTNQQKRAPIRKLYDDPSQSSELLSEAKKLNDSQTREQKLISEEDLAKPTTTPAPRPPTPAPTIASQPLSLRPEACRPAAGGAVHTRGLDFACDIYIWAPLAGTCGVLLLSLVITLYCKRGRKKLLYIFKQPFMRPVQTTQEEDGCSCRFPEEEEGGCELRVKFSRSADAPAYQQGQNQLYNELNLGRREEYDVLDKRRGRDPEMGGKPRRKNPQEGLYNELQKDKMAEAYSEIGMKGERRRGKGHDGLYQGLSTATKDTYDALHMQALPPRSSGSGEGRGSLLTCGDVEENPGPHMTEYKPTVRLATRDDVPRAVRTLAAAFADYPATRHTVDPDRHIERVTELQELFLTRVGLDIGKVWVADDGAAVAVWTTPESVEAGAVFAEIGPRMAELSGSRLAAQQQMEGLLAPHRPKEPAWFLATVGVSPDHQGKGLGSAVVLPGVEAAERAGVPAFLETSAPRNLPFYERLGFTVTADVEVPEGPRTWCMTRKPGA

SEQ ID NO: 3366 - protein, 609 aa, Artificial Sequence
  Synthetic Polypeptide
MALPVTALLLPLALLLHAARPDEFGSDLGIKLLFAAAKGQDDEVRILLAAGADVNAKDFEGYTPLHVAAYDGHLEIVEVLLKAGADVNAKDSQGRTPLHEAAYSGHLEIVEVLLKAGADVNAQDDAGETPADLAAAWGHEDIAEVLQKTREQKLISEEDLAKPTTTPAPRPPTPAPTIASQPLSLRPEACRPAAGGAVHTRGLDFACDIYIWAPLAGTCGVLLLSLVITLYCKRGRKKLLYIFKQPFMRPVQTTQEEDGCSCRFPEEEEGGCELRVKFSRSADAPAYQQGQNQLYNELNLGRREEYDVLDKRRGRDPEMGGKPRRKNPQEGLYNELQKDKMAEAYSEIGMKGERRRGKGHDGLYQGLSTATKDTYDALHMQALPPRSSGSGEGRGSLLTCGDVEENPGPHMTEYKPTVRLATRDDVPRAVRTLAAAFADYPATRHTVDPDRHIERVTELQELFLTRVGLDIGKVWVADDGAAVAVWTTPESVEAGAVFAEIGPRMAELSGSRLAAQQQMEGLLAPHRPKEPAWFLATVGVSPDHQGKGLGSAVVLPGVEAAERAGVPAFLETSAPRNLPFYERLGFTVTADVEVPEGPRTWCMTRKPGA

SEQ ID NO: 3367 - protein, 608 aa, Artificial Sequence
  Synthetic Polypeptide
MDWIWRILFLVGAATGAHSFERSDLGKKLLEAARAGQDDEVRILMANGADVNAKDEYGLTPLYLATAHGHLEIVEVLLKNGADVNAVDAIGFTPLHLAAFIGHLEIAEVLLKHGADVNAQDKFGKTAFDISIGNGNEDLAEILQKLNTREQKLISEEDLAKPTTTPAPRPPTPAPTIASQPLSLRPEACRPAAGGAVHTRGLDFACDIYIWAPLAGTCGVLLLSLVITLYCKRGRKKLLYIFKQPFMRPVQTTQEEDGCSCRFPEEEEGGCELRVKFSRSADAPAYQQGQNQLYNELNLGRREEYDVLDKRRGRDPEMGGKPRRKNPQEGLYNELQKDKMAEAYSEIGMKGERRRGKGHDGLYQGLSTATKDTYDALHMQALPPRSSGSGEGRGSLLTCGDVEENPGPHMTEYKPTVRLATRDDVPRAVRTLAAAFADYPATRHTVDPDRHIERVTELQELFLTRVGLDIGKVWVADDGAAVAVWTTPESVEAGAVFAEIGPRMAELSGSRLAAQQQMEGLLAPHRPKEPAWFLATVGVSPDHQGKGLGSAVVLPGVEAAERAGVPAFLETSAPRNLPFYERLGFTVTADVEVPEGPRTWCMTRKPGA

SEQ ID NO: 3368 - protein, 760 aa, Artificial Sequence
  Synthetic Polypeptide
MALPVTALLLPLALLLHAARPDEFEVQLVESGGGLVQAGGSLRLSCAASGITFSINTMGWYRQAPGKQRELVALISSIGDTYYADSVKGRFTISRDNAKNTVYLQMNSLKPEDTAVYYCKRFRTAAQGTDYWGQGTQVTVSSLEGGGGSGGGGSGGGGSGSGGSGSGGSGSGGSGSGGSFEVQLVESGGGLVQPGGSLRLSCAASGSIFGFNDMAWYRQAPGKQRELVALISRVGVTSSADSVKGRFTISRVNAKDTVYLQMNSLKPEDTAVYYCYMDQRLDGSTLAYWGQGTQVTVSSTREQKLISEEDLAKPTTTPAPRPPTPAPTIASQPLSLRPEACRPAAGGAVHTRGLDFACDIYIWAPLAGTCGVLLLSLVITLYCKRGRKKLLYIFKQPFMRPVQTTQEEDGCSCRFPEEEEGGCELRVKFSRSADAPAYQQGQNQLYNELNLGRREEYDVLDKRRGRDPEMGGKPRRKNPQEGLYNELQKDKMAEAYSEIGMKGERRRGKGHDGLYQGLSTATKDTYDALHMQALPPRSSGSGEGRGSLLTCGDVEENPGPHMTEYKPTVRLATRDDVPRAVRTLAAAFADYPATRHTVDPDRHIERVTELQELFLTRVGLDIGKVWVADDGAAVAVWTTPESVEAGAVFAEIGPRMAELSGSRLAAQQQMEGLLAPHRPKEPAWFLATVGVSPDHQGKGLGSAVVLPGVEAAERAGVPAFLETSAPRNLPFYERLGFTVTADVEVPEGPRTWCMTRKPGA

SEQ ID NO: 3369 - protein, 724 aa, Artificial Sequence
  Synthetic Polypeptide
MALPVTALLLPLALLLHAARPDIQMTQSPSSLSASVGDRVTITCRASQDVNTAVAWYQQKPGKAPKLLIYSASFLESGVPSRFSGSRSGTDFTLTISSLQPEDFATYYCQQHYTTPPTFGQTKVEIKRGGGGSGGGGSGGGGSEVQLVESGGGLVQPGGSLRLSCAASGFNIKDTYIHWVRQAPGKGLEWVARIYPTNGYTRYADSVKGRFTISADTSKNTAYLQMNSLRAEDTAVYYCSRWGGDGFYAMDVWGQGTLVTVSSTREQKLISEEDLAKPTTTPAPRPPTPAPTIASQPLSLRPEACRPAAGGAVHTRGLDFACDIYIWAPLAGTCGVLLLSLVITLYCKRGRKKLLYIFKQPFMRPVQTTQEEDGCSCRFPEEEEGGCELRVKFSRSADAPAYQQGQNQLYNELNLGRREEYDVLDKRRGRDPEMGGKPRRKNPQEGLYNELQKDKMAEAYSEIGMKGERRRGKGHDGLYQGLSTATKDTYDALHMQALPPRSSGSGEGRGSLLTCGDVEENPGPHMTEYKPTVRLATRDDVPRAVRTLAAAFADYPATRHTVDPDRHIERVTELQELFLTRVGLDIGKVWVADDGAAVAVWTTPESVEAGAVFAEIGPRMAELSGSRLAAQQQMEGLLAPHRPKEPAWFLATVGVSPDHQGKGLGSAVVLPGVEAAERAGVPAFLETSAPRNLPFYERLGFTVTADVEVPEGPRTWCMTRKPGA

SEQ ID NO: 3370 - protein, 603 aa, Artificial Sequence
  Synthetic Polypeptide
MALPVTALLLPLALLLHAARPDEFDVQLVESGGGLVQPGGSLRLSCAASGSIGGLNAMAWYRQAPGKERELVAGIFGVGSTRYADSVKGRFTISRDNSKNTVYLQMNSLRPEDTAVYYCRMSSVTRGSSDYWGQGTLVTVSSTREQKLISEEDLAKPTTTPAPRPPTPAPTIASQPLSLRPEACRPAAGGAVHTRGLDFACDIYIWAPLAGTCGVLLLSLVITLYCKRGRKKLLYIFKQPFMRPVQTTQEEDGCSCRFPEEEEGGCELRVKFSRSADAPAYQQGQNQLYNELNLGRREEYDVLDKRRGRDPEMGGKPRRKNPQEGLYNELQKDKMAEAYSEIGMKGERRRGKGHDGLYQGLSTATKDTYDALHMQALPPRSSGSGEGRGSLLTCGDVEENPGPHMTEYKPTVRLATRDDVPRAVRTLAAAFADYPATRHTVDPDRHIERVTELQELFLTRVGLDIGKVWVADDGAAVAVWTTPESVEAGAVFAEIGPRMAELSGSRLAAQQQMEGLLAPHRPKEPAWFLATVGVSPDHQGKGLGSAVVLPGVEAAERAGVPAFLETSAPRNLPFYERLGFTVTADVEVPEGPRTWCMTRKPGA

SEQ ID NO: 3371 - protein, 543 aa, Artificial Sequence
  Synthetic Polypeptide
MALPVTALLLPLALLLHAARPDEFVDNKFNKERYSAYYEIWQLPNLNVRQKAAFIGSLQDDPSQSANLLAEAKKLNDAQAPKTREQKLISEEDLAKPTTTPAPRPPTPAPTIASQPLSLRPEACRPAAGGAVHTRGLDFACDIYIWAPLAGTCGVLLLSLVITLYCKRGRKKLLYIFKQPFMRPVQTTQEEDGCSCRFPEEEEGGCELRVKFSRSADAPAYQQGQNQLYNELNLGRREEYDVLDKRRGRDPEMGGKPRRKNPQEGLYNELQKDKMAEAYSEIGMKGERRRGKGHDGLYQGLSTATKDTYDALHMQALPPRSSGSGEGRGSLLTCGDVEENPGPHMTEYKPTVRLATRDDVPRAVRTLAAAFADYPATRHTVDPDRHIERVTELQELFLTRVGLDIGKVWVADDGAAVAVWTTPESVEAGAVFAEIGPRMAELSGSRLAAQQQMEGLLAPHRPKEPAWFLATVGVSPDHQGKGLGSAVVLPGVEAAERAGVPAFLETSAPRNLPFYERLGFTVTADVEVPEGPRTWCMTRKPGA

SEQ ID NO: 3372 - protein, 765 aa, Artificial Sequence
  Synthetic Polypeptide
MALPVTALLLPLALLLHAARPDEFDVQLVESGGGLVQPGGSLRLSCAASGSIGGLNAMAWYRQAPGKERELVAGIFGVGSTRYADSVKGRFTISRDNSKNTVYLQMNSLRPEDTAVYYCRMSSVTRGSSDYWGQGTLVTVSSLEGGGGSGGGGSGGGGSGSGGSGSGGSGSGGSGSGGSFEVQLVESGGSLVQPGGSLRLSCAASGFTFDDYAMSWVRQVPGKGLEWVSSINWSGTHTDYADSVKGRFTISRNNANNTLYLQMNSLKSEDTAVYYCAKNWRDAGTTWFEKSGSAGQGTQVTVSSTREQKLISEEDLAKPTTTPAPRPPTPAPTIASQPLSLRPEACRPAAGGAVHTRGLDFACDIYIWAPLAGTCGVLLLSLVITLYCKRGRKKLLYIFKQPFMRPVQTTQEEDGCSCRFPEEEEGGCELRVKFSRSADAPAYQQGQNQLYNELNLGRREEYDVLDKRRGRDPEMGGKPRRKNPQEGLYNELQKDKMAEAYSEIGMKGERRRGKGHDGLYQGLSTATKDTYDALHMQALPPRSSGSGEGRGSLLTCGDVEENPGPHMTEYKPTVRLATRDDVPRAVRTLAAAFADYPATRHTVDPDRHIERVTELQELFLTRVGLDIGKVWVADDGAAVAVWTTPESVEAGAVFAEIGPRMAELSGSRLAAQQQMEGLLAPHRPKEPAWFLATVGVSPDHQGKGLGSAVVLPGVEAAERAGVPAFLETSAPRNLPFYERLGFTVTADVEVPEGPRTWCMTRKPGA

SEQ ID NO: 3373 - protein, 723 aa, Artificial Sequence
  Synthetic Polypeptide
MALPVTALLLPLALLLHAARPDQSVLTQPPSVSVAPGKTARIPCEGNYIGSSNVHWYQQKPGQAPVLVIHFDSDRPSGIPDRFSGSNSGNMATLTISRVEAGDEADYYCQVWENHGWVFGGGTKLTVLSGGGGSGGGGSGGGGSEVQLVETGGGLVQPGESLRLSCAASGFTFSDYEMNWVRQAPGKGLEWVSYISSSGSTIYYADSVKGRFTIYRDNAKNSLYLQMNSLRAEDTALYYCARAWGVGPPDYWGQGTLVTVSSTREQKLISEEDLAKPTTTPAPRPPTPAPTIASQPLSLRPEACRPAAGGAVHTRGLDFACDIYIWAPLAGTCGVLLLSLVITLYCKRGRKKLLYIFKQPFMRPVQTTQEEDGCSCRFPEEEEGGCELRVKFSRSADAPAYQQGQNQLYNELNLGRREEYDVLDKRRGRDPEMGGKPRRKNPQEGLYNELQKDKMAEAYSEIGMKGERRRGKGHDGLYQGLSTATKDTYDALHMQALPPRSSGSGEGRGSLLTCGDVEENPGPHMTEYKPTVRLATRDDVPRAVRTLAAAFADYPATRHTVDPDRHIERVTELQELFLTRVGLDIGKVWVADDGAAVAVWTTPESVEAGAVFAEIGPRMAELSGSRLAAQQQMEGLLAPHRPKEPAWFLATVGVSPDHQGKGLGSAVVLPGVEAAERAGVPAFLETSAPRNLPFYERLGFTVTADVEVPEGPRTWCMTRKPGA

SEQ ID NO: 3374 - protein, 731 aa, Artificial Sequence
  Synthetic Polypeptide
MALPVTALLLPLALLLHAARPDIQMTQSPSSLSASVGDTVTITCQANGYLNWYQQRRGKAPKLLIYDGSKLERGVPSRFSGRRWGQEYNLTINNLQPEDIATYFCQVYEFVVPGTRLDLKRTVAAPGGGGSGGGGSGGGGSQVQLLQSGAAVTKPGASVRVSCEASGYNIRDYFIHWWRQAPGQGLQWVGWINPKTGQPNNPRQFQGRVSLTRHASWDFDTFSFYMDLKALRSDDTAVYFCARQRSDYWDFDVWGSGTQVTVSSASTKGPTREQKLISEEDLAKPTTTPAPRPPTPAPTIASQPLSLRPEACRPAAGGAVHTRGLDFACDIYIWAPLAGTCGVLLLSLVITLYCKRGRKKLLYIFKQPFMRPVQTTQEEDGCSCRFPEEEEGGCELRVKFSRSADAPAYQQGQNQLYNELNLGRREEYDVLDKRRGRDPEMGGKPRRKNPQEGLYNELQKDKMAEAYSEIGMKGERRRGKGHDGLYQGLSTATKDTYDALHMQALPPRSSGSGEGRGSLLTCGDVEENPGPHMTEYKPTVRLATRDDVPRAVRTLAAAFADYPATRHTVDPDRHIERVTELQELFLTRVGLDIGKVWVADDGAAVAVWTTPESVEAGAVFAEIGPRMAELSGSRLAAQQQMEGLLAPHRPKEPAWFLATVGVSPDHQGKGLGSAVVLPGVEAAERAGVPAFLETSAPRNLPFYERLGFTVTADVEVPEGPRTWCMTRKPGA

SEQ ID NO: 3375 - protein, 737 aa, Artificial Sequence
  Synthetic Polypeptide
MALPVTALLLPLALLLHAARPQSALTQPPSASGSPGQSITISCTGTSNNFVSWYQQHAGKAPKLVIYDVNKRPSGVPDRFSGSKSGNTASLTVSGLQTDDEAVYYCGSLVGNWDVIFGGGTKLTVLGGGGSGGGGSGGGGSQPQLQESGPTLVEASETLSLTCAVSGDSTAACNSFWGWVRQPPGKGLEWVGSLSHCASYWNRGWTYHNPSLKSRLTLALDTPKNLVFLKLNSVTAADTATYYCARFGGEVLRYTDWPKPAWVDLWGRGTLVTVSSTREQKLISEEDLAKPTTTPAPRPPTPAPTIASQPLSLRPEACRPAAGGAVHTRGLDFACDIYIWAPLAGTCGVLLLSLVITLYCKRGRKKLLYIFKQPFMRPVQTTQEEDGCSCRFPEEEEGGCELRVKFSRSADAPAYQQGQNQLYNELNLGRREEYDVLDKRRGRDPEMGGKPRRKNPQEGLYNELQKDKMAEAYSEIGMKGERRRGKGHDGLYQGLSTATKDTYDALHMQALPPRSSGSGEGRGSLLTCGDVEENPGPHMTEYKPTVRLATRDDVPRAVRTLAAAFADYPATRHTVDPDRHIERVTELQELFLTRVGLDIGKVWVADDGAAVAVWTTPESVEAGAVFAEIGPRMAELSGSRLAAQQQMEGLLAPHRPKEPAWFLATVGVSPDHQGKGLGSAVVLPGVEAAERAGVPAFLETSAPRNLPFYERLGFTVTADVEVPEGPRTWCMTRKPGA

SEQ ID NO: 3376 - protein, 722 aa, Artificial Sequence
  Synthetic Polypeptide
MALPVTALLLPLALLLHAARPEIVLTQSPGTLSLSPGETAIISCRTSQYGSLAWYQQRPGQAPRLVIYSGSTRAAGIPDRFSGSRWGPDYNLTISNLESGDFGVYYCQQYEFFGQGTKVQVDIKRGGGGSGGGGSGGGGSQVQLVQSGGQMKKPGESMRISCRASGYEFIDCTLNWIRLAPGKRPEWMGWLKPRGGAVNYARPLQGRVTMTRDVYSDTAFLELRSLTVDDTAVYFCTRGKNCDYNWDFEHWGRGTPVIVSSTREQKLISEEDLAKPTTTPAPRPPTPAPTIASQPLSLRPEACRPAAGGAVHTRGLDFACDIYIWAPLAGTCGVLLLSLVITLYCKRGRKKLLYIFKQPFMRPVQTTQEEDGCSCRFPEEEEGGCELRVKFSRSADAPAYQQGQNQLYNELNLGRREEYDVLDKRRGRDPEMGGKPRRKNPQEGLYNELQKDKMAEAYSEIGMKGERRRGKGHDGLYQGLSTATKDTYDALHMQALPPRSSGSGEGRGSLLTCGDVEENPGPHMTEYKPTVRLATRDDVPRAVRTLAAAFADYPATRHTVDPDRHIERVTELQELFLTRVGLDIGKVWVADDGAAVAVWTTPESVEAGAVFAEIGPRMAELSGSRLAAQQQMEGLLAPHRPKEPAWFLATVGVSPDHQGKGLGSAVVLPGVEAAERAGVPAFLETSAPRNLPFYERLGFTVTADVEVPEGPRTWCMTRKPGA

SEQ ID NO: 3377 - protein, 732 aa, Artificial Sequence
  Synthetic Polypeptide
MALPVTALLLPLALLLHAARPELVLTQSPGTLSLSAGERATLSCRASQSVSSGSLAWYQQKPGQAPRLLIYGASTRATGIPDRFSGSGSGTDFTLTIGRLEPEDLAVYYCQQYGTSPYTFGQGTKLEIGGGGSGGGGSGGGGSLEQSGAEVKKPGSSVQVSCKASGGTFSMYGFNWVRQAPGHGLEWMGGIIPIFGTSNYAQKFRGRVTFTADQATSTAYMELTNLRSDDTAVYYCARDFGPDWEDGDSYDGSGRGFFDFWGQGTLVTVSSTREQKLISEEDLAKPTTTPAPRPPTPAPTIASQPLSLRPEACRPAAGGAVHTRGLDFACDIYIWAPLAGTCGVLLLSLVITLYCKRGRKKLLYIFKQPFMRPVQTTQEEDGCSCRFPEEEEGGCELRVKFSRSADAPAYQQGQNQLYNELNLGRREEYDVLDKRRGRDPEMGGKPRRKNPQEGLYNELQKDKMAEAYSEIGMKGERRRGKGHDGLYQGLSTATKDTYDALHMQALPPRSSGSGEGRGSLLTCGDVEENPGPHMTEYKPTVRLATRDDVPRAVRTLAAAFADYPATRHTVDPDRHIERVTELQELFLTRVGLDIGKVWVADDGAAVAVWTTPESVEAGAVFAEIGPRMAELSGSRLAAQQQMEGLLAPHRPKEPAWFLATVGVSPDHQGKGLGSAVVLPGVEAAERAGVPAFLETSAPRNLPFYERLGFTVTADVEVPEGPRTWCMTRKPGA

SEQ ID NO: 3378 - protein, 728 aa, Artificial Sequence
  Synthetic Polypeptide
MALPVTALLLPLALLLHAARPDVVMTQSPSSLSASVGDRVTITCQSSLDISHYLNWYQQKPGKAPKLLIYDASNLETGVPSRFSGSGSGTHFTFTISSLQPEDFATYYCQQYDNLPLTFGGGTKLEIKRGGGGSGGGGSGGGGSQVQLVQSGGGVVQPGGSLRVSCAASGVTLSDYGMHWVRQAPGKGLEWVAFIRNDGSDKYYADSVKGRFTISRDNSEKTVSLQMSSLRAEDTAVYYCAKNGESGPLDYWYLDLWGRGTLVTVSSTREQKLISEEDLAKPTTTPAPRPPTPAPTIASQPLSLRPEACRPAAGGAVHTRGLDFACDIYIWAPLAGTCGVLLLSLVITLYCKRGRKKLLYIFKQPFMRPVQTTQEEDGCSCRFPEEEEGGCELRVKFSRSADAPAYQQGQNQLYNELNLGRREEYDVLDKRRGRDPEMGGKPRRKNPQEGLYNELQKDKMAEAYSEIGMKGERRRGKGHDGLYQGLSTATKDTYDALHMQALPPRSSGSGEGRGSLLTCGDVEENPGPHMTEYKPTVRLATRDDVPRAVRTLAAAFADYPATRHTVDPDRHIERVTELQELFLTRVGLDIGKVWVADDGAAVAVWTTPESVEAGAVFAEIGPRMAELSGSRLAAQQQMEGLLAPHRPKEPAWFLATVGVSPDHQGKGLGSAVVLPGVEAAERAGVPAFLETSAPRNLPFYERLGFTVTADVEVPEGPRTWCMTRKPGA

SEQ ID NO: 3379 - protein, 728 aa, Artificial Sequence
  Synthetic Polypeptide
MALPVTALLLPLALLLHAARPDDIVMTQSQDSMATSVGERVTVNCKASQNVDTNVAWYQQKPGQSPEPLLFSASYRYTGVPDRFSGSGSGTDFTLTISSVQAEDVAEYFCQQYNSYPLTFGQGTKLEIKRGGGGSGGGGSGGGGSEVQVEVSGGGLVQPGGSMRLSCAVSGFTFSNYWMNWVRQSPEKGLEWIAEIRLKSNNFARYYAESVKGRFTISRDNSKNSLYLQMISLRAEDTAIYYCTSYGNYVGHYFDHWGQGTLLTVSSTREQKLISEEDLAKPTTTPAPRPPTPAPTIASQPLSLRPEACRPAAGGAVHTRGLDFACDIYIWAPLAGTCGVLLLSLVITLYCKRGRKKLLYIFKQPFMRPVQTTQEEDGCSCRFPEEEEGGCELRVKFSRSADAPAYQQGQNQLYNELNLGRREEYDVLDKRRGRDPEMGGKPRRKNPQEGLYNELQKDKMAEAYSEIGMKGERRRGKGHDGLYQGLSTATKDTYDALHMQALPPRSSGSGEGRGSLLTCGDVEENPGPHMTEYKPTVRLATRDDVPRAVRTLAAAFADYPATRHTVDPDRHIERVTELQELFLTRVGLDIGKVWVADDGAAVAVWTTPESVEAGAVFAEIGPRMAELSGSRLAAQQQMEGLLAPHRPKEPAWFLATVGVSPDHQGKGLGSAVVLPGVEAAERAGVPAFLETSAPRNLPFYERLGFTVTADVEVPEGPRTWCMTRKPGA

SEQ ID NO: 3380 - protein, 732 aa, Artificial Sequence
  Synthetic Polypeptide
MALPVTALLLPLALLLHAARPSYELTQPPSVSGTPGQRVAISCSGSSSNIGTRMVTWYQHVPGTAPKLLIFNNNQRPSGVPDRFSASKSGTSASLAIIGLQSDDEADYYCATWDDNVKSYVFGTGTKVTVLGSRGGGGSGGGGSGGGGSLEMAQVQLQQWGAGLLKPSETLSLTCAVYGGSFSGYYWSWIRQPPGKGLEWIGEINHSGSTNYNPSLKSRVTISVDTSKNQFSLKLSSVTAADTAVYYCARAPQSWYVGDVWGQGTLVTVSSTREQKLISEEDLAKPTTTPAPRPPTPAPTIASQPLSLRPEACRPAAGGAVHTRGLDFACDIYIWAPLAGTCGVLLLSLVITLYCKRGRKKLLYIFKQPFMRPVQTTQEEDGCSCRFPEEEEGGCELRVKFSRSADAPAYQQGQNQLYNELNLGRREEYDVLDKRRGRDPEMGGKPRRKNPQEGLYNELQKDKMAEAYSEIGMKGERRRGKGHDGLYQGLSTATKDTYDALHMQALPPRSSGSGEGRGSLLTCGDVEENPGPHMTEYKPTVRLATRDDVPRAVRTLAAAFADYPATRHTVDPDRHIERVTELQELFLTRVGLDIGKVWVADDGAAVAVWTTPESVEAGAVFAEIGPRMAELSGSRLAAQQQMEGLLAPHRPKEPAWFLATVGVSPDHQGKGLGSAVVLPGVEAAERAGVPAFLETSAPRNLPFYERLGFTVTADVEVPEGPRTWCMTRKPGA

SEQ ID NO: 3381 - protein, 729 aa, Artificial Sequence
  Synthetic Polypeptide
MALPVTALLLPLALLLHAARPQSVLTQPPSLSVAPGKTASITCGGNNIGMKSVHWYQQRPGQAPVLVIYYDSDRPSGIPGRFSGSNSGNTATLTISRVEAGDEADYYCQVWDTTGDHPGYVFGTGTKVTVLGGGGSGGGGSGGGGSQVQLVQSGAEVKKPGSSVKVSCKASGGTFSSYAISWVRQAPGQGLEWMGGIIPIFGTANYAQKFQGRVTITADESTSTAYMELSSLRSEDTAVYYCARGVYGYSGSAPYDEWGQGTLVTVSSTREQKLISEEDLAKPTTTPAPRPPTPAPTIASQPLSLRPEACRPAAGGAVHTRGLDFACDIYIWAPLAGTCGVLLLSLVITLYCKRGRKKLLYIFKQPFMRPVQTTQEEDGCSCRFPEEEEGGCELRVKFSRSADAPAYQQGQNQLYNELNLGRREEYDVLDKRRGRDPEMGGKPRRKNPQEGLYNELQKDKMAEAYSEIGMKGERRRGKGHDGLYQGLSTATKDTYDALHMQALPPRSSGSGEGRGSLLTCGDVEENPGPHMTEYKPTVRLATRDDVPRAVRTLAAAFADYPATRHTVDPDRHIERVTELQELFLTRVGLDIGKVWVADDGAAVAVWTTPESVEAGAVFAEIGPRMAELSGSRLAAQQQMEGLLAPHRPKEPAWFLATVGVSPDHQGKGLGSAVVLPGVEAAERAGVPAFLETSAPRNLPFYERLGFTVTADVEVPEGPRTWCMTRKPGA

SEQ ID NO: 3382 - protein, 735 aa, Artificial Sequence
  Synthetic Polypeptide
MALPVTALLLPLALLLHAARPDEIVLTQSPLSLPVTPGEPASISCRSSQSLLHSNGYNYLDWYLQKPGQSPQLLIYLGSNRASGVPDRFSGSGSGTDFTLKISRVEAEDVGVYYCMQALQTPRTFGQGTKVEIKRGGGGSGGGGSGGGGSQVQLVQSGGGVVQPGRSLRLSCAASGFTFSSYGMHWVRQAPGKGLEWVAVISYDGSNKYYADSVKGRFTISRDNSKNTLYLQMNSLRAEDTAVYYCARDFDYGDSYYYYGMDVWGQGTTVTVSSTREQKLISEEDLAKPTTTPAPRPPTPAPTIASQPLSLRPEACRPAAGGAVHTRGLDFACDIYIWAPLAGTCGVLLLSLVITLYCKRGRKKLLYIFKQPFMRPVQTTQEEDGCSCRFPEEEEGGCELRVKFSRSADAPAYQQGQNQLYNELNLGRREEYDVLDKRRGRDPEMGGKPRRKNPQEGLYNELQKDKMAEAYSEIGMKGERRRGKGHDGLYQGLSTATKDTYDALHMQALPPRSSGSGEGRGSLLTCGDVEENPGPHMTEYKPTVRLATRDDVPRAVRTLAAAFADYPATRHTVDPDRHIERVTELQELFLTRVGLDIGKVWVADDGAAVAVWTTPESVEAGAVFAEIGPRMAELSGSRLAAQQQMEGLLAPHRPKEPAWFLATVGVSPDHQGKGLGSAVVLPGVEAAERAGVPAFLETSAPRNLPFYERLGFTVTADVEVPEGPRTWCMTRKPGA

SEQ ID NO: 3383 - protein, 729 aa, Artificial Sequence
  Synthetic Polypeptide
MALPVTALLLPLALLLHAARPDEIVLTQSPATLSLSPGERATLSCRASQSVGSYLAWYQQKPGAPRLLIYDASHRATGIPARFSGSGSGTDFTLTISSLEPEDFAVYYCQQRSNWPPMYTFGQGTKLEIKRGGGGSGGGGSGGGGSEVQLVQSGAEVSVKVSCKASGGKKPGSTFSSYTISWVRQAPGQGLEWMGGIIPIFGTANYAQKFQGRVTITADKSTSTAYMELSSLRSEDTAVYYCAGDTDSSGYYGAVDYWGQGTLVTVSSTREQKLISEEDLAKPTTTPAPRPPTPAPTIASQPLSLRPEACRPAAGGAVHTRGLDFACDIYIWAPLAGTCGVLLLSLVITLYCKRGRKKLLYIFKQPFMRPVQTTQEEDGCSCRFPEEEEGGCELRVKFSRSADAPAYQQGQNQLYNELNLGRREEYDVLDKRRGRDPEMGGKPRRKNPQEGLYNELQKDKMAEAYSEIGMKGERRRGKGHDGLYQGLSTATKDTYDALHMQALPPRSSGSGEGRGSLLTCGDVEENPGPHMTEYKPTVRLATRDDVPRAVRTLAAAFADYPATRHTVDPDRHIERVTELQELFLTRVGLDIGKVWVADDGAAVAVWTTPESVEAGAVFAEIGPRMAELSGSRLAAQQQMEGLLAPHRPKEPAWFLATVGVSPDHQGKGLGSAVVLPGVEAAERAGVPAFLETSAPRNLPFYERLGFTVTADVEVPEGPRTWCMTRKPGA

SEQ ID NO: 3384 - protein, 712 aa, Artificial Sequence
  Synthetic Polypeptide
MALPVTALLLPLALLLHAARPDIQMTQSPSSLSASVGDRVTITCQASQDINNYLNWYQQKPGKAPKLLIYDASNLQTGVPSRFSGSGSGTDFTFTIEDIATYYCQQYTFGPGTKVDIKGGGGSGGGGSGGGGSEVQLLESGGGLVQPGGSLRLSCAASGFTFSWYSMTWVRQAPGKGLEWVSSIVPWGDFTQYADSVKGRFTISRDNSKNTLYLQMNSLRAEDTAVYYCAKGPGWGSFDLWGRGTLVTVSSTREQKLISEEDLAKPTTTPAPRPPTPAPTIASQPLSLRPEACRPAAGGAVHTRGLDFACDIYIWAPLAGTCGVLLLSLVITLYCKRGRKKLLYIFKQPFMRPVQTTQEEDGCSCRFPEEEEGGCELRVKFSRSADAPAYQQGQNQLYNELNLGRREEYDVLDKRRGRDPEMGGKPRRKNPQEGLYNELQKDKMAEAYSEIGMKGERRRGKGHDGLYQGLSTATKDTYDALHMQALPPRSSGSGEGRGSLLTCGDVEENPGPHMTEYKPTVRLATRDDVPRAVRTLAAAFADYPATRHTVDPDRHIERVTELQELFLTRVGLDIGKVWVADDGAAVAVWTTPESVEAGAVFAEIGPRMAELSGSRLAAQQQMEGLLAPHRPKEPAWFLATVGVSPDHQGKGLGSAVVLPGVEAAERAGVPAFLETSAPRNLPFYERLGFTVTADVEVPEGPRTWCMTRKPGA

SEQ ID NO: 3385 - protein, 601 aa, Artificial Sequence
  Synthetic Polypeptide
MDWIWRILFLVGAATGAHSEVQLVESGGGLVQPGGSLRLSCAASGSVFKINVMAWYRQAPGKGRELVAGIISGGSTSYADSVKGRFTISRDNAKNTLYLQMNSLRPEDTAVYYCAFITTESDYDLGRRYWGQGTLVTVSSTREQKLISEEDLAKPTTTPAPRPPTPAPTIASQPLSLRPEACRPAAGGAVHTRGLDFACDIYIWAPLAGTCGVLLLSLVITLYCKRGRKKLLYIFKQPFMRPVQTTQEEDGCSCRFPEEEEGGCELRVKFSRSADAPAYQQGQNQLYNELNLGRREEYDVLDKRRGRDPEMGGKPRRKNPQEGLYNELQKDKMAEAYSEIGMKGERRRGKGHDGLYQGLSTATKDTYDALHMQALPPRSSGSGEGRGSLLTCGDVEENPGPHMTEYKPTVRLATRDDVPRAVRTLAAAFADYPATRHTVDPDRHIERVTELQELFLTRVGLDIGKVWVADDGAAVAVWTTPESVEAGAVFAEIGPRMAELSGSRLAAQQQMEGLLAPHRPKEPAWFLATVGVSPDHQGKGLGSAVVLPGVEAAERAGVPAFLETSAPRNLPFYERLGFTVTADVEVPEGPRTWCMTRKPGA

SEQ ID NO: 3386 - protein, 722 aa, Artificial Sequence
  Synthetic Polypeptide
MALPVTALLLPLALLLHAARPDIQMTQSPSSLSASVGDRVTITCTASLSVSSTYLHWYQQKPGSSPKLWIYSTSNLASGVPSRFSGSGSGTSYTLTISSLQPEDFATYYCHQYHRSPLTFGGGTKVEIKRGGGGSGGGGSGGGGSEVQLVESGGGLVQPGGSLRLSCAASGFSLTKYGVHWVRQAPGKGLEWVGVKWAGGSTDYNSALMSRFTISKDNAKNSLYLQMNSLRAEDTAVYYCARDHRDAMDYWGQGTLVTVSSTREQKLISEEDLAKPTTTPAPRPPTPAPTIASQPLSLRPEACRPAAGGAVHTRGLDFACDIYIWAPLAGTCGVLLLSLVITLYCKRGRKKLLYIFKQPFMRPVQTTQEEDGCSCRFPEEEEGGCELRVKFSRSADAPAYQQGQNQLYNELNLGRREEYDVLDKRRGRDPEMGGKPRRKNPQEGLYNELQKDKMAEAYSEIGMKGERRRGKGHDGLYQGLSTATKDTYDALHMQALPPRSSGSGEGRGSLLTCGDVEENPGPHMTEYKPTVRLATRDDVPRAVRTLAAAFADYPATRHTVDPDRHIERVTELQELFLTRVGLDIGKVWVADDGAAVAVWTTPESVEAGAVFAEIGPRMAELSGSRLAAQQQMEGLLAPHRPKEPAWFLATVGVSPDHQGKGLGSAVVLPGVEAAERAGVPAFLETSAPRNLPFYERLGFTVTADVEVPEGPRTWCMTRKPGA

SEQ ID NO: 3387 - protein, 726 aa, Artificial Sequence
  Synthetic Polypeptide
MALPVTALLLPLALLLHAARPDIQMTQSPSSLSASVGDRVTITCKASQDVGTAVAWYQQKPGKAPKLLIYSASYRSTGVPSRFSGSGSGTDFTLTISSLQPEDFATYYCQHHYSAPWTFGGGTKVEIKGGGGSGGGGSGGGGSEVQLVESGGGLVQPGGSLRLSCAASGFTFSRNGMSWVRQAPGKGLEWVATVSSGGSYIYYADSVKGRFTISRDNAKNSLYLQMNSLRAEDTAVYYCARQGTTALATRFFDVWGQGTLVTVSSTREQKLISEEDLAKPTTTPAPRPPTPAPTIASQPLSLRPEACRPAAGGAVHTRGLDFACDIYIWAPLAGTCGVLLLSLVITLYCKRGRKKLLYIFKQPFMRPVQTTQEEDGCSCRFPEEEEGGCELRVKFSRSADAPAYQQGQNQLYNELNLGRREEYDVLDKRRGRDPEMGGKPRRKNPQEGLYNELQKDKMAEAYSEIGMKGERRRGKGHDGLYQGLSTATKDTYDALHMQALPPRSSGSGEGRGSLLTCGDVEENPGPHMTEYKPTVRLATRDDVPRAVRTLAAAFADYPATRHTVDPDRHIERVTELQELFLTRVGLDIGKVWVADDGAAVAVWTTPESVEAGAVFAEIGPRMAELSGSRLAAQQQMEGLLAPHRPKEPAWFLATVGVSPDHQGKGLGSAVVLPGVEAAERAGVPAFLETSAPRNLPFYERLGFTVTADVEVPEGPRTWCMTRKPGA

SEQ ID NO: 3388 - protein, 732 aa, Artificial Sequence
  Synthetic Polypeptide
MALPVTALLLPLALLLHAARPDIVMTQSPSSLTMSVGQKVTMSCKSSHSLLNSRNQKNYLAWFQQKPGQSPKLLVYFASTRESGVPDRFIGSGSGTDFTLTISNVQAEDLADYFCQQHYTTLPTFGGGTKLEIKGGGGSGGGGSGGGGSQIQLVQSGPDLKKPGETVKISCKASGYTFTNTGMNWVKQAPGKGLKWMGWINTYTGEPTYADDFKGRFTFSLETSASTAYLQINNLKNEDTATYFCTRWGYGSSLYYAMDYWGQGTSVTVSSTREQKLISEEDLAKPTTTPAPRPPTPAPTIASQPLSLRPEACRPAAGGAVHTRGLDFACDIYIWAPLAGTCGVLLLSLVITLYCKRGRKKLLYIFKQPFMRPVQTTQEEDGCSCRFPEEEEGGCELRVKFSRSADAPAYQQGQNQLYNELNLGRREEYDVLDKRRGRDPEMGGKPRRKNPQEGLYNELQKDKMAEAYSEIGMKGERRRGKGHDGLYQGLSTATKDTYDALHMQALPPRSSGSGEGRGSLLTCGDVEENPGPHMTEYKPTVRLATRDDVPRAVRTLAAAFADYPATRHTVDPDRHIERVTELQELFLTRVGLDIGKVWVADDGAAVAVWTTPESVEAGAVFAEIGPRMAELSGSRLAAQQQMEGLLAPHRPKEPAWFLATVGVSPDHQGKGLGSAVVLPGVEAAERAGVPAFLETSAPRNLPFYERLGFTVTADVEVPEGPRTWCMTRKPGA

SEQ ID NO: 3389 - protein, 722 aa, Artificial Sequence
  Synthetic Polypeptide
MALPVTALLLPLALLLHAARPDIQMTQSPPSLSASVGGKVTITCKASQDIDRYMAWYQDKPGKGPKLLIHDTSTLQPGIPSRFSGSGSGRDYSFSISNLEPEDIATYYCLQYDNLWTFGGGTKLEIKRGGGGSGGGGSGGGGSQVQLVQSGAELVKPGASVKMSCKASGYIFTNYNIHWVKKSPGQGLEWIGAIYPGNGDAPYSQKFQDRATLTADTSSSTTYMELSSLTSEDSAVYYCVRANWDVAFAYWGQGTLVSVSSTREQKLISEEDLAKPTTTPAPRPPTPAPTIASQPLSLRPEACRPAAGGAVHTRGLDFACDIYIWAPLAGTCGVLLLSLVITLYCKRGRKKLLYIFKQPFMRPVQTTQEEDGCSCRFPEEEEGGCELRVKFSRSADAPAYQQGQNQLYNELNLGRREEYDVLDKRRGRDPEMGGKPRRKNPQEGLYNELQKDKMAEAYSEIGMKGERRRGKGHDGLYQGLSTATKDTYDALHMQALPPRSSGSGEGRGSLLTCGDVEENPGPHMTEYKPTVRLATRDDVPRAVRTLAAAFADYPATRHTVDPDRHIERVTELQELFLTRVGLDIGKVWVADDGAAVAVWTTPESVEAGAVFAEIGPRMAELSGSRLAAQQQMEGLLAPHRPKEPAWFLATVGVSPDHQGKGLGSAVVLPGVEAAERAGVPAFLETSAPRNLPFYERLGFTVTADVEVPEGPRTWCMTRKPGA

SEQ ID NO: 3390 - protein, 723 aa, Artificial Sequence
  Synthetic Polypeptide
MALPVTALLLPLALLLHAARPDIQMTQSPASLSASVGETVTITCRVSGNIHNYLAWYQQKQGKSPQLLVYNAKTLADGVPSRFSGSGSGTQYSLKINSLQPEDFGSYYCQHFWSNPYTFGGGTKLEIKGGGGSGGGGSGGGGSQVQLQQSGASVKVSCKASELVRPGTGYAFTNYLIEWVKQRPGQGLEWIGVINPGSGGTNYNEKFKGKATLTADKSSSTAYMQLSSLTSDDSAVYFCARYRSYDWYFDVWGAGTTVTVSSTREQKLISEEDLAKPTTTPAPRPPTPAPTIASQPLSLRPEACRPAAGGAVHTRGLDFACDIYIWAPLAGTCGVLLLSLVITLYCKRGRKKLLYIFKQPFMRPVQTTQEEDGCSCRFPEEEEGGCELRVKFSRSADAPAYQQGQNQLYNELNLGRREEYDVLDKRRGRDPEMGGKPRRKNPQEGLYNELQKDKMAEAYSEIGMKGERRRGKGHDGLYQGLSTATKDTYDALHMQALPPRSSGSGEGRGSLLTCGDVEENPGPHMTEYKPTVRLATRDDVPRAVRTLAAAFADYPATRHTVDPDRHIERVTELQELFLTRVGLDIGKVWVADDGAAVAVWTTPESVEAGAVFAEIGPRMAELSGSRLAAQQQMEGLLAPHRPKEPAWFLATVGVSPDHQGKGLGSAVVLPGVEAAERAGVPAFLETSAPRNLPFYERLGFTVTADVEVPEGPRTWCMTRKPGA

SEQ ID NO: 3391 - protein, 728 aa, Artificial Sequence
  Synthetic Polypeptide
MALPVTALLLPLALLLHAARPDDIQMTQSPSSLSASVGDRVTITCRSSQRIVHSNGNTYLEWYQQTPGKAPKLLIYKVSNRFSGVPSRFSGSGSGTDYTPTISSLQPEDIATYYCFQGSHVPPTFGQGTKLQITGGGGSGGGGSGGGGSEVQLVESGGGVVQPGRSLRLSCSSSGPTFSDYYMYWVRQAPGKGLEWVAYMSNVGAITDYPDTVKGRPTISRDNSKNTLFLMDSLRPEDTGVYFCARGTRDGSWFAYWGQGTPVTVSSTREQKLISEEDLAKPTTTPAPRPPTPAPTIASQPLSLRPEACRPAAGGAVHTRGLDFACDIYIWAPLAGTCGVLLLSLVITLYCKRGRKKLLYIFKQPFMRPVQTTQEEDGCSCRFPEEEEGGCELRVKFSRSADAPAYQQGQNQLYNELNLGRREEYDVLDKRRGRDPEMGGKPRRKNPQEGLYNELQKDKMAEAYSEIGMKGERRRGKGHDGLYQGLSTATKDTYDALHMQALPPRSSGSGEGRGSLLTCGDVEENPGPHMTEYKPTVRLATRDDVPRAVRTLAAAFADYPATRHTVDPDRHIERVTELQELFLTRVGLDIGKVWVADDGAAVAVWTTPESVEAGAVFAEIGPRMAELSGSRLAAQQQMEGLLAPHRPKEPAWFLATVGVSPDHQGKGLGSAVVLPGVEAAERAGVPAFLETSAPRNLPFYERLGFTVTADVEVPEGPRTWCMTRKPGA

SEQ ID NO: 3392 - protein, 722 aa, Artificial Sequence
  Synthetic Polypeptide
MALPVTALLLPLALLLHAARPDIQMTQSFSSLSASVGDRVTITCRASQDISNYLNWYQQKPGKAPKLLIYYTSRLHSGVPSRFSGSGSGTDYTLTISSLQPEDFATYFCQQGNTLPWTFGGGTKLEIKRGGGGSGGGGSGGGGSEVQLVQSGGGLVQSGGSLRLSCRASGYTFTRYWMLWVRQRPGKGLEWVAEINPRNDRTNYNEKFKTRFTISVDRSKNTLYLQMDSLRAEDTAVYFCALGGGYAMDYWGQGTLVTVSSTREQKLISEEDLAKPTTTPAPRPPTPAPTIASQPLSLRPEACRPAAGGAVHTRGLDFACDIYIWAPLAGTCGVLLLSLVITLYCKRGRKKLLYIFKQPFMRPVQTTQEEDGCSCRFPEEEEGGCELRVKFSRSADAPAYQQGQNQLYNELNLGRREEYDVLDKRRGRDPEMGGKPRRKNPQEGLYNELQKDKMAEAYSEIGMKGERRRGKGHDGLYQGLSTATKDTYDALHMQALPPRSSGSGEGRGSLLTCGDVEENPGPHMTEYKPTVRLATRDDVPRAVRTLAAAFADYPATRHTVDPDRHIERVTELQELFLTRVGLDIGKVWVADDGAAVAVWTTPESVEAGAVFAEIGPRMAELSGSRLAAQQQMEGLLAPHRPKEPAWFLATVGVSPDHQGKGLGSAVVLPGVEAAERAGVPAFLETSAPRNLPFYERLGFTVTADVEVPEGPRTWCMTRKPGA

SEQ ID NO: 3393 - protein, 709 aa, Artificial Sequence
  Synthetic Polypeptide
MEMLQGLLLLLLLSMGGAWASREPLRPWCHPINAILAVEKEGCPVCITVNTTICAGYCPTMMRVLQAVLPPLPQVVCTYRDVRFESIRLPGCPRGVDPVVSFPVALSCRCGPCRRSTSDCGGPKDHPLTCDHPQLSGLLFLGGGGSGGGGSGGGGSAPDVQDCPECTLQENPFFSQPGAPILQCMGCCFSRAYPTPLRSKKTMLVQKNVTSESTCCVAKSYNRVTVMGGFKVENHTACHCSTCYYHKSTREQKLISEEDLAKPTTTPAPRPPTPAPTIASQPLSLRPEACRPAAGGAVHTRGLDFACDIYIWAPLAGTCGVLLLSLVITLYCKRGRKKLLYIFKQPFMRPVQTTQEEDGCSCRFPEEEEGGCELRVKFSRSADAPAYQQGQNQLYNELNLGRREEYDVLDKRRGRDPEMGGKPRRKNPQEGLYNELQKDKMAEAYSEIGMKGERRRGKGHDGLYQGLSTATKDTYDALHMQALPPRSSGSGEGRGSLLTCGDVEENPGPHMTEYKPTVRLATRDDVPRAVRTLAAAFADYPATRHTVDPDRHIERVTELQELFLTRVGLDIGKVWVADDGAAVAVWTTPESVEAGAVFAEIGPRMAELSGSRLAAQQQMEGLLAPHRPKEPAWFLATVGVSPDHQGKGLGSAVVLPGVEAAERAGVPAFLETSAPRNLPFYERLGFTVTADVEVPEGPRTWCMTRKPGA

SEQ ID NO: 3394 - protein, 723 aa, Artificial Sequence
  Synthetic Polypeptide
MALPVTALLLPLALLLHAARPDIQMTQSPASLSASVGETVTIICRASVNIYSYLAWYQQKQGKSPQLLVYNAKILAEGVPSRFSGSGSGTQFSLKINSLQPEDFGSYYCQHHYGTFTFGSGTKLEIKRGGGGSGGGGSGGGGSQVQLKESGPGLVAPSQSLSITCTISGFSLTSYGVHWVRQPPGKGLEWLVVIWSDGSTTYNSALKSRLSISKDNSKSQVFLKMNSLQTDDTAIYYCASHYGSTLAFASWGHGTLVTVSAATREQKLISEEDLAKPTTTPAPRPPTPAPTIASQPLSLRPEACRPAAGGAVHTRGLDFACDIYIWAPLAGTCGVLLLSLVITLYCKRGRKKLLYIFKQPFMRPVQTTQEEDGCSCRFPEEEEGGCELRVKFSRSADAPAYQQGQNQLYNELNLGRREEYDVLDKRRGRDPEMGGKPRRKNPQEGLYNELQKDKMAEAYSEIGMKGERRRGKGHDGLYQGLSTATKDTYDALHMQALPPRSSGSGEGRGSLLTCGDVEENPGPHMTEYKPTVRLATRDDVPRAVRTLAAAFADYPATRHTVDPDRHIERVTELQELFLTRVGLDIGKVWVADDGAAVAVWTTPESVEAGAVFAEIGPRMAELSGSRLAAQQQMEGLLAPHRPKEPAWFLATVGVSPDHQGKGLGSAVVLPGVEAAERAGVPAFLETSAPRNLPFYERLGFTVTADVEVPEGPRTWCMTRKPGA

SEQ ID NO: 3395 - protein, 731 aa, Artificial Sequence
  Synthetic Polypeptide
MALPVTALLLPLALLLHAARPDIVMTQSHKFMSTSVGDRVSVTCKASQNVGNNVAWYQQKPGQSPKVLIYSASYRYSGVPDRFTGSGSGTDFTLTISNVQSEDLAEYFCQQYNTYPFTFGSGTKLEIKGGGGSGGGGSGGGGSEVQLEESGGGLVQPGGSMKLSCVASGFTFSNYWMNWVRQSPEKGLEWVAEIRFKSHNYATHFAESVKGRFTISRDDSKSSVYLQMNNLRAEDTGIYYCTRRIGNSDYDWWYFDVWGAGTSVTVSSASTREQKLISEEDLAKPTTTPAPRPPTPAPTIASQPLSLRPEACRPAAGGAVHTRGLDFACDIYIWAPLAGTCGVLLLSLVITLYCKRGRKKLLYIFKQPFMRPVQTTQEEDGCSCRFPEEEEGGCELRVKFSRSADAPAYQQGQNQLYNELNLGRREEYDVLDKRRGRDPEMGGKPRRKNPQEGLYNELQKDKMAEAYSEIGMKGERRRGKGHDGLYQGLSTATKDTYDALHMQALPPRSSGSGEGRGSLLTCGDVEENPGPHMTEYKPTVRLATRDDVPRAVRTLAAAFADYPATRHTVDPDRHIERVTELQELFLTRVGLDIGKVWVADDGAAVAVWTTPESVEAGAVFAEIGPRMAELSGSRLAAQQQMEGLLAPHRPKEPAWFLATVGVSPDHQGKGLGSAVVLPGVEAAERAGVPAFLETSAPRNLPFYERLGFTVTADVEVPEGPRTWCMTRKPGA

SEQ ID NO: 3396 - protein, 727 aa, Artificial Sequence; identical to SEQ ID NO: 3281
  Synthetic Polypeptide

SEQ ID NO: 3397 - protein, 733 aa, Artificial Sequence
  Synthetic Polypeptide
MALPVTALLLPLALLLHAARPDQSVLTQPPSVSGAPGQRVTISCTGSSSNIGAGYDVHWYQQLPGTAPKLLIYGNSNRPSGVPDRFSGSKSGTSASLAITGLQAEDEADYYCQSYDNSLSSWVFGGGTKLTVLGQPKGGGGSGGGGSGGGGSEVQLQQSGAEVKKPGSSVKVSCKASGGTFSSYAISWVRQAPGQGLEWMGRIIPILGIANYAQKFQGRVTITADKSTSTAYMELSSLRSEDTAVYYCARDVGSGSYSLDYWGQGTLVTVSSTREQKLISEEDLAKPTTTPAPRPPTPAPTIASQPLSLRPEACRPAAGGAVHTRGLDFACDIYIWAPLAGTCGVLLLSLVITLYCKRGRKKLLYIFKQPFMRPVQTTQEEDGCSCRFPEEEEGGCELRVKFSRSADAPAYQQGQNQLYNELNLGRREEYDVLDKRRGRDPEMGGKPRRKNPQEGLYNELQKDKMAEAYSEIGMKGERRRGKGHDGLYQGLSTATKDTYDALHMQALPPRSSGSGEGRGSLLTCGDVEENPGPHMTEYKPTVRLATRDDVPRAVRTLAAAFADYPATRHTVDPDRHIERVTELQELFLTRVGLDIGKVWVADDGAAVAVWTTPESVEAGAVFAEIGPRMAELSGSRLAAQQQMEGLLAPHRPKEPAWFLATVGVSPDHQGKGLGSAVVLPGVEAAERAGVPAFLETSAPRNLPFYERLGFTVTADVEVPEGPRTWCMTRKPGA

SEQ ID NO: 3398 - protein, 730 aa, Artificial Sequence
  Synthetic Polypeptide
MALPVTALLLPLALLLHAARPDQSVVTQPPSVSAAPGRKVTISCSGSSSNIGSNYVSWYQQVPGTAPKLLIYEDDKRPSGIPDRFSGSKSGTSATLGITGLQTGDEADYFCATWDRTVNVVRFGGGTRLTVHSQPKGGGGSGGGGSGGGGSQLQLQESGPGLVKPSETLSLTCTVSGGSISSSSYYWGWIRQPPGKGLEWIGSIYYSGSTYYNPSLKSRVTISVDTSKNQFSLKLSSVTAADTAVYYCARHVGHELDYWGQGTLVTVSSTREQKLISEEDLAKPTTTPAPRPPTPAPTIASQPLSLRPEACRPAAGGAVHTRGLDFACDIYIWAPLAGTCGVLLLSLVITLYCKRGRKKLLYIFKQPFMRPVQTTQEEDGCSCRFPEEEEGGCELRVKFSRSADAPAYQQGQNQLYNELNLGRREEYDVLDKRRGRDPEMGGKPRRKNPQEGLYNELQKDKMAEAYSEIGMKGERRRGKGHDGLYQGLSTATKDTYDALHMQALPPRSSGSGEGRGSLLTCGDVEENPGPHMTEYKPTVRLATRDDVPRAVRTLAAAFADYPATRHTVDPDRHIERVTELQELFLTRVGLDIGKVWVADDGAAVAVWTTPESVEAGAVFAEIGPRMAELSGSRLAAQQQMEGLLAPHRPKEPAWFLATVGVSPDHQGKGLGSAVVLPGVEAAERAGVPAFLETSAPRNLPFYERLGFTVTADVEVPEGPRTWCMTRKPGA

SEQ ID NO: 3399 - protein, 724 aa, Artificial Sequence
  Synthetic Polypeptide
MALPVTALLLPLALLLHAARPDIQMTQSPSSLSASVGDRVTITCRASQSISSYLNWYQQKPGKAPKLLIYAASSLQSGVPSGFSGSGSGTDFTLTISSLQPEDFATYYCQQSYSTPLTFGGGTKVEIKRGGGGSGGGGSGGGGSQVQLQESGPGLVKPSETLSLTCTVSGGSVSSGSYYWSWIRQPPGKGLEWIGYIYYSGSTNYNPSLKSRVTISVDTSKNQFSLKLSSVTAADTAVYYCAREGKNGAFDIWGQGTMVTVSSTREQKLISEEDLAKPTTTPAPRPPTPAPTIASQPLSLRPEACRPAAGGAVHTRGLDFACDIYIWAPLAGTCGVLLLSLVITLYCKRGRKKLLYIFKQPFMRPVQTTQEEDGCSCRFPEEEEGGCELRVKFSRSADAPAYQQGQNQLYNELNLGRREEYDVLDKRRGRDPEMGGKPRRKNPQEGLYNELQKDKMAEAYSEIGMKGERRRGKGHDGLYQGLSTATKDTYDALHMQALPPRSSGSGEGRGSLLTCGDVEENPGPHMTEYKPTVRLATRDDVPRAVRTLAAAFADYPATRHTVDPDRHIERVTELQELFLTRVGLDIGKVWVADDGAAVAVWTTPESVEAGAVFAEIGPRMAELSGSRLAAQQQMEGLLAPHRPKEPAWFLATVGVSPDHQGKGLGSAVVLPGVEAAERAGVPAFLETSAPRNLPFYERLGFTVTADVEVPEGPRTWCMTRKPGA

SEQ ID NO: 3400 - protein, 610 aa, Artificial Sequence
  Synthetic Polypeptide
MALPVTALLLPLALLLHAARPDEFDVQLVESGGGLVQPGGSLRLSCAASGFILDYYAIGWFRQAPGKEREGVLCIDASDDITYYADSVKGRFTISRDNSKNTVYLQMNSLRPEDTAVYYCATPIGLSSSCLLEYDYDYWGQGTLVTVSSTREQKLISEEDLAKPTTTPAPRPPTPAPTIASQPLSLRPEACRPAAGGAVHTRGLDFACDIYIWAPLAGTCGVLLLSLVITLYCKRGRKKLLYIFKQPFMRPVQTTQEEDGCSCRFPEEEEGGCELRVKFSRSADAPAYQQGQNQLYNELNLGRREEYDVLDKRRGRDPEMGGKPRRKNPQEGLYNELQKDKMAEAYSEIGMKGERRRGKGHDGLYQGLSTATKDTYDALHMQALPPRSSGSGEGRGSLLTCGDVEENPGPHMTEYKPTVRLATRDDVPRAVRTLAAAFADYPATRHTVDPDRHIERVTELQELFLTRVGLDIGKVWVADDGAAVAVWTTPESVEAGAVFAEIGPRMAELSGSRLAAQQQMEGLLAPHRPKEPAWFLATVGVSPDHQGKGLGSAVVLPGVEAAERAGVPAFLETSAPRNLPFYERLGFTVTADVEVPEGPRTWCMTRKPGA

SEQ ID NO: 3401 - protein, 773 aa, Artificial Sequence
  Synthetic Polypeptide
MALPVTALLLPLALLLHAARPDEFDVQLVESGGGLVQPGGSLRLSCAASGFILDYYAIGWFRQAPGKEREGVLCIDASDDITYYADSVKGRFTISRDNSKNTVYLQMNSLRPEDTAVYYCATPIGLSSSCLLEYDYDYWGQGTLVTVSSLEGGSGSGGGGSGGGGSGSGGSGSGGSGSGGSGSGGSFEVQLVESGGGLVQPGGSLRLSCAASGRTYYLNAMGWFRQAPGKEREFVAAIDWSEGNKDYADSVKGRFTISRDNSKNTVYLQMNSLRPEDTAVYYCAADTPPWGPLIYIESYDSWGQGTLVTVSSTREQKLISEEDLAKPTTTPAPRPPTPAPTIASQPLSLRPEACRPAAGGAVHTRGLDFACDIYIWAPLAGTCGVLLLSLVITLYCKRGRKKLLYIFKQPFMRPVQTTQEEDGCSCRFPEEEEGGCELRVKFSRSADAPAYQQGQNQLYNELNLGRREEYDVLDKRRGRDPEMGGKPRRKNPQEGLYNELQKDKMAEAYSEIGMKGERRRGKGHDGLYQGLSTATKDTYDALHMQALPPRSSGSGEGRGSLLTCGDVEENPGPHMTEYKPTVRLATRDDVPRAVRTLAAAFADYPATRHTVDPDRHIERVTELQELFLTRVGLDIGKVWVADDGAAVAVWTTPESVEAGAVFAEIGPRMAELSGSRLAAQQQMEGLLAPHRPKEPAWFLATVGVSPDHQGKGLGSAVVLPGVEAAERAGVPAFLETSAPRNLPFYERLGFTVTADVEVPEGPRTWCMTRKPGA

SEQ ID NO: 3402 - protein, 724 aa, Artificial Sequence
  Synthetic Polypeptide
MALPVTALLLPLALLLHAARPDQIVLTQSPAIMSASPGEKVTISCSASSSVSYMYWYQQKPGSSPKPWIYRTSNLASGVPARFSGSGSGTSYSLTISNMEAEDAAAYYCQQYHSYPTTFGGGTKLEVKGGGGSGGGGSGGGGSEVQLVESGGGLVQPKGSLKLSCAASGFSFNTYAMNWVRQAPGKGLEWIAHIRSKSNNFATYYADSVKDRFSISRDASENILFLQMNNLKTEDTAMYYCVRQGGDFPMDYWGQGTSVTVSSTREQKLISEEDLAKPTTTPAPRPPTPAPTIASQPLSLRPEACRPAAGGAVHTRGLDFACDIYIWAPLAGTCGVLLLSLVITLYCKRGRKKLLYIFKQPFMRPVQTTQEEDGCSCRFPEEEEGGCELRVKFSRSADAPAYQQGQNQLYNELNLGRREEYDVLDKRRGRDPEMGGKPRRKNPQEGLYNELQKDKMAEAYSEIGMKGERRRGKGHDGLYQGLSTATKDTYDALHMQALPPRSSGSGEGRGSLLTCGDVEENPGPHMTEYKPTVRLATRDDVPRAVRTLAAAFADYPATRHTVDPDRHIERVTELQELFLTRVGLDIGKVWVADDGAAVAVWTTPESVEAGAVFAEIGPRMAELSGSRLAAQQQMEGLLAPHRPKEPAWFLATVGVSPDHQGKGLGSAVVLPGVEAAERAGVPAFLETSAPRNLPFYERLGFTVTADVEVPEGPRTWCMTRKPGA

SEQ ID NO: 3403 - protein, 723 aa, Artificial Sequence
  Synthetic Polypeptide
MALPVTALLLPLALLLHAARPDDIQMTQSSSSFSVSLGDRVTITCMASEDIYIRLAWYQQKPGNAPRLLISAATSLETGVPSRFSGSGSGKDYTLSITSLQTEDVGTYYCQQYWSSPWTFGGGTKLEINGGGGSGGGGSGGGGSDVQLQESGPGLVKPSQSLSLTCTVTGYSITSDYTWNWIRQFPGNKLEWMGYITYSGSTSYNPSLKSRNSITRDTSKNQFFLQLNSVTTEDTATYYCARLGRRYTMDYWGQGTSVTVSSTREQKLISEEDLAKPTTTPAPRPPTPAPTIASQPLSLRPEACRPAAGGAVHTRGLDFACDIYIWAPLAGTCGVLLLSLVITLYCKRGRKKLLYIFKQPFMRPVQTTQEEDGCSCRFPEEEEGGCELRVKFSRSADAPAYQQGQNQLYNELNLGRREEYDVLDKRRGRDPEMGGKPRRKNPQEGLYNELQKDKMAEAYSEIGMKGERRRGKGHDGLYQGLSTATKDTYDALHMQALPPRSSGSGEGRGSLLTCGDVEENPGPHMTEYKPTVRLATRDDVPRAVRTLAAAFADYPATRHTVDPDRHIERVTELQELFLTRVGLDIGKVWVADDGAAVAVWTTPESVEAGAVFAEIGPRMAELSGSRLAAQQQMEGLLAPHRPKEPAWFLATVGVSPDHQGKGLGSAVVLPGVEAAERAGVPAFLETSAPRNLPFYERLGFTVTADVEVPEGPRTWCMTRKPGA

SEQ ID NO: 3404 - protein, 722 aa, Artificial Sequence
  Synthetic Polypeptide
MALPVTALLLPLALLLHAARPDVQLQESGPGLVKPSQSLSLTCTVTGYSITSDYTWNWIRQFPGNKLEWMGYITYSGSTSYNPSLKSRNSITRDTSKNQFFLQLNSVTTEDTATYYCARLGRRYTMDYWGQGTSVTVSSGGGGSGGGGSGGGGSDIQMTQSSSSFSVSLGDRVTITCMASEDIYIRLAWYQQKPGNAPRLLISAATSLETGVPSRFSGSGSGKDYTLSITSLQTEDVGTYYCQQYWSSPWTFGGGTKLEINTREQKLISEEDLAKPTTTPAPRPPTPAPTIASQPLSLRPEACRPAAGGAVHTRGLDFACDIYIWAPLAGTCGVLLLSLVITLYCKRGRKKLLYIFKQPFMRPVQTTQEEDGCSCRFPEEEEGGCELRVKFSRSADAPAYQQGQNQLYNELNLGRREEYDVLDKRRGRDPEMGGKPRRKNPQEGLYNELQKDKMAEAYSEIGMKGERRRGKGHDGLYQGLSTATKDTYDALHMQALPPRSSGSGEGRGSLLTCGDVEENPGPHMTEYKPTVRLATRDDVPRAVRTLAAAFADYPATRHTVDPDRHIERVTELQELFLTRVGLDIGKVWVADDGAAVAVWTTPESVEAGAVFAEIGPRMAELSGSRLAAQQQMEGLLAPHRPKEPAWFLATVGVSPDHQGKGLGSAVVLPGVEAAERAGVPAFLETSAPRNLPFYERLGFTVTADVEVPEGPRTWCMTRKPGA

SEQ ID NO: 3405 - protein, 723 aa, Artificial Sequence
  Synthetic Polypeptide
MALPVTALLLPLALLLHAARPDIQMTQSSSSFSVSLGDRVTITCKASEDIYIRLAWYQQKPGNAPRLLISAATSLETGIPSRFSGSGSGEDYTLTITSLQTEDVATYYCQQYWTTPWTFGGGTKLEIKRGGGGSGGGGSGGGGSDVQLQESGPGLVKPSQSLSLTCTVTGYSITIDYTWNWIRQFPGNKLEWMGYITYSGSTDYNPSLKSRSSITRDTSMNQFFLQLNSVTTEDTATYYCARLGRRYALDYWGQGTSVTVSSTREQKLISEEDLAKPTTTPAPRPPTPAPTIASQPLSLRPEACRPAAGGAVHTRGLDFACDIYIWAPLAGTCGVLLLSLVITLYCKRGRKKLLYIFKQPFMRPVQTTQEEDGCSCRFPEEEEGGCELRVKFSRSADAPAYQQGQNQLYNELNLGRREEYDVLDKRRGRDPEMGGKPRRKNPQEGLYNELQKDKMAEAYSEIGMKGERRRGKGHDGLYQGLSTATKDTYDALHMQALPPRSSGSGEGRGSLLTCGDVEENPGPHMTEYKPTVRLATRDDVPRAVRTLAAAFADYPATRHTVDPDRHIERVTELQELFLTRVGLDIGKVWVADDGAAVAVWTTPESVEAGAVFAEIGPRMAELSGSRLAAQQQMEGLLAPHRPKEPAWFLATVGVSPDHQGKGLGSAVVLPGVEAAERAGVPAFLETSAPRNLPFYERLGFTVTADVEVPEGPRTWCMTRKPGA

SEQ ID NO: 3406 - protein, 724 aa, Artificial Sequence
  Synthetic Polypeptide
MALPVTALLLPLALLLHAARPDIVMTQAAPSIPVTPGESVSISCRSDKSLLHSNGNTYLFWFLQRPGQSPQLLIYRMSNLASGVPDRFSGSGSGTAFTLRISGVEAEDVGVYYCMQHLEYPYTFGGGTKLEIKGGGGSGGGGSGGGGSQVQLQQSGPELVKPGASVKMSCKASGYAFSSSWLNWVRQRPGKGLEWIGRIYPGDGENHYNGKFKGKATLTADKSSSTGYMQLSSLTSEDSAVYFCASYYEGGYWGQGTLITVSATREQKLISEEDLAKPTTTPAPRPPTPAPTIASQPLSLRPEACRPAAGGAVHTRGLDFACDIYIWAPLAGTCGVLLLSLVITLYCKRGRKKLLYIFKQPFMRPVQTTQEEDGCSCRFPEEEEGGCELRVKFSRSADAPAYQQGQNQLYNELNLGRREEYDVLDKRRGRDPEMGGKPRRKNPQEGLYNELQKDKMAEAYSEIGMKGERRRGKGHDGLYQGLSTATKDTYDALHMQALPPRSSGSGEGRGSLLTCGDVEENPGPHMTEYKPTVRLATRDDVPRAVRTLAAAFADYPATRHTVDPDRHIERVTELQELFLTRVGLDIGKVWVADDGAAVAVWTTPESVEAGAVFAEIGPRMAELSGSRLAAQQQMEGLLAPHRPKEPAWFLATVGVSPDHQGKGLGSAVVLPGVEAAERAGVPAFLETSAPRNLPFYERLGFTVTADVEVPEGPRTWCMTRKPGA

SEQ ID NO: 3407 - protein, 723 aa, Artificial Sequence
  Synthetic Polypeptide
MALPVTALLLPLALLLHAARPDIVLTQSPASLAVSLGQSVTISCRASESVEYYGTSLMQWYQQKPGQPPKLLIYGASNVESGVPARFSGSGSGTDFSLNIHPVEEDDIAMYFCQQSRKVPWTFGGGTKLEIKGGGGSGGGGSGGGGSEVKLVESGGGLVKPGGSRKLSCAASGFTFSSYTMSWVRQTPAKRLEWVATISSGSSTIYYADTVKGRFTISRDNAKNTLFLQMTSLRSEDTAMYYCARRWFLDCWGQGTTLTVSSTREQKLISEEDLAKPTTTPAPRPPTPAPTIASQPLSLRPEACRPAAGGAVHTRGLDFACDIYIWAPLAGTCGVLLLSLVITLYCKRGRKKLLYIFKQPFMRPVQTTQEEDGCSCRFPEEEEGGCELRVKFSRSADAPAYQQGQNQLYNELNLGRREEYDVLDKRRGRDPEMGGKPRRKNPQEGLYNELQKDKMAEAYSEIGMKGERRRGKGHDGLYQGLSTATKDTYDALHMQALPPRSSGSGEGRGSLLTCGDVEENPGPHMTEYKPTVRLATRDDVPRAVRTLAAAFADYPATRHTVDPDRHIERVTELQELFLTRVGLDIGKVWVADDGAAVAVWTTPESVEAGAVFAEIGPRMAELSGSRLAAQQQMEGLLAPHRPKEPAWFLATVGVSPDHQGKGLGSAVVLPGVEAAERAGVPAFLETSAPRNLPFYERLGFTVTADVEVPEGPRTWCMTRKPGA

SEQ ID NO: 3408 - protein, 726 aa, Artificial Sequence
  Synthetic Polypeptide
MALPVTALLLPLALLLHAARPDQVQLQQSGPGLVKPSETLSLTCTVSGDSISSYYWSWIRQPPGKGLEWIGYIYYSGSTNYNPSLKSRVTISVDTSKSQFSLKLSSVTAADTAVYYCARGRYFDVWGRGTMVTSSGGGGSGGGGSGGGGSSSYVLTQPPSVSGSPGQSITISCTGTSSDVGGYNYVSWYQQHPGKAPKLMIYEGSKRPSGVSNRFSGSKSGNTASLTISGLQAEDEADYYCSSYTTRSTRVFGGGTKLTVLGAAATREQKLISEEDLAKPTTTPAPRPPTPAPTIASQPLSLRPEACRPAAGGAVHTRGLDFACDIYIWAPLAGTCGVLLLSLVITLYCKRGRKKLLYIFKQPFMRPVQTTQEEDGCSCRFPEEEEGGCELRVKFSRSADAPAYQQGQNQLYNELNLGRREEYDVLDKRRGRDPEMGGKPRRKNPQEGLYNELQKDKMAEAYSEIGMKGERRRGKGHDGLYQGLSTATKDTYDALHMQALPPRSSGSGEGRGSLLTCGDVEENPGPHMTEYKPTVRLATRDDVPRAVRTLAAAFADYPATRHTVDPDRHIERVTELQELFLTRVGLDIGKVWVADDGAAVAVWTTPESVEAGAVFAEIGPRMAELSGSRLAAQQQMEGLLAPHRPKEPAWFLATVGVSPDHQGKGLGSAVVLPGVEAAERAGVPAFLETSAPRNLPFYERLGFTVTADVEVPEGPRTWCMTRKPGA

SEQ ID NO: 3409 - protein, 727 aa, Artificial Sequence
  Synthetic Polypeptide
MALPVTALLLPLALLLHAARPDIVMTQSPLSLPVTPGEPASISCRSSKSLLHSNGNTYLYWFQQKPGQAPRLLIYRMSNLASGVPDRFSGSGSGTAFTLKISRVEAEDVGVYYCMQHIEYPFTFGQGTKLEIKGGGGSGGGGSGGGGSQVQLVQSGPEVKKPGASVKVSCKASGYTFTNSWMNWVRQRPGKGLEWIGRIYPGDGETIYNGKFRVRVTITADESTSTAYMELSSLRSEDTAVYYCARGYDDYSFAYWGQGTTVTVSSTREQKLISEEDLAKPTTTPAPRPPTPAPTIASQPLSLRPEACRPAAGGAVHTRGLDFACDIYIWAPLAGTCGVLLLSLVITLYCKRGRKKLLYIFKQPFMRPVQTTQEEDGCSCRFPEEEEGGCELRVKFSRSADAPAYQQGQNQLYNELNLGRREEYDVLDKRRGRDPEMGGKPRRKNPQEGLYNELQKDKMAEAYSEIGMKGERRRGKGHDGLYQGLSTATKDTYDALHMQALPPRSSGSGEGRGSLLTCGDVEENPGPHMTEYKPTVRLATRDDVPRAVRTLAAAFADYPATRHTVDPDRHIERVTELQELFLTRVGLDIGKVWVADDGAAVAVWTTPESVEAGAVFAEIGPRMAELSGSRLAAQQQMEGLLAPHRPKEPAWFLATVGVSPDHQGKGLGSAVVLPGVEAAERAGVPAFLETSAPRNLPFYERLGFTVTADVEVPEGPRTWCMTRKPGA

SEQ ID NO: 3410 - protein, 727 aa, Artificial Sequence
  Synthetic Polypeptide
MALPVTALLLPLALLLHAARPDEIVMTQSPATLSLSPGERATLSCRASQSVSSYLAWYQQKPGQAPRLLIYDASNRATGIPARFSGSGSGTDFTLTISSLEPEDFAVYYCHQYGSSPQTFGQGTKVEIKRGGGGSGGGGSGGGGSEVQLVQSGAEVKKPGSSVKVSCKASGGTFSSYAISWVRQAPGQGLEWMGGIIPIFGTANYAQKFQGRVTITADESTSTAYMELSSLRSEDTAVYYCAVHYGDYVFSSMDVWGQGTTVTVSSTREQKLISEEDLAKPTTTPAPRPPTPAPTIASQPLSLRPEACRPAAGGAVHTRGLDFACDIYIWAPLAGTCGVLLLSLVITLYCKRGRKKLLYIFKQPFMRPVQTTQEEDGCSCRFPEEEEGGCELRVKFSRSADAPAYQQGQNQLYNELNLGRREEYDVLDKRRGRDPEMGGKPRRKNPQEGLYNELQKDKMAEAYSEIGMKGERRRGKGHDGLYQGLSTATKDTYDALHMQALPPRSSGSGEGRGSLLTCGDVEENPGPHMTEYKPTVRLATRDDVPRAVRTLAAAFADYPATRHTVDPDRHIERVTELQELFLTRVGLDIGKVWVADDGAAVAVWTTPESVEAGAVFAEIGPRMAELSGSRLAAQQQMEGLLAPHRPKEPAWFLATVGVSPDHQGKGLGSAVVLPGVEAAERAGVPAFLETSAPRNLPFYERLGFTVTADVEVPEGPRTWCMTRKPGA

SEQ ID NO: 3411 - protein, 730 aa, Artificial Sequence
  Synthetic Polypeptide
MALPVTALLLPLALLLHAARPDETTLTQSPGTLSLSPGERATLSCRASQSVSSSYLAWYQQKPGQAPRLLIYGASSRATGIPDRFSGSGSGTDFTLTISRLEPEDFAVYYCQQYGSSPRTFGQGTKVEIKRGGGGSGGGGSGGGGSEVQLVQSGAEVKKPGSSVKVSCKASGGTFSSYAISWVRQAPGQGLEWMGGIIPIFGTANYAQKFQGRVTITADESTSTAYMELSSLRSEDTAVYYCARGPEYCINGVCSLDVWGQGTTVTVSSTREQKLISEEDLAKPTTTPAPRPPTPAPTIASQPLSLRPEACRPAAGGAVHTRGLDFACDIYIWAPLAGTCGVLLLSLVITLYCKRGRKKLLYIFKQPFMRPVQTTQEEDGCSCRFPEEEEGGCELRVKFSRSADAPAYQQGQNQLYNELNLGRREEYDVLDKRRGRDPEMGGKPRRKNPQEGLYNELQKDKMAEAYSEIGMKGERRRGKGHDGLYQGLSTATKDTYDALHMQALPPRSSGSGEGRGSLLTCGDVEENPGPHMTEYKPTVRLATRDDVPRAVRTLAAAFADYPATRHTVDPDRHIERVTELQELFLTRVGLDIGKVWVADDGAAVAVWTTPESVEAGAVFAEIGPRMAELSGSRLAAQQQMEGLLAPHRPKEPAWFLATVGVSPDHQGKGLGSAVVLPGVEAAERAGVPAFLETSAPRNLPFYERLGFTVTADVEVPEGPRTWCMTRKPGA

SEQ ID NO: 3412 - protein, 732 aa, Artificial Sequence
  Synthetic Polypeptide
MALPVTALLLPLALLLHAARPDIELTQSPSSLAVSAGEKVTMSCKSSQSLLNSRTRKNQLAWYQQKPGQSPELLIYWASTRQSGVPDRFTGSGSGTDFTLTISSVQAEDLAVYYCQQSYNLLTFGPGTKLEVKRGGGGSGGGGSGGGGSVKLQESGGGFVKPGGSLKVSCAASGFTFSSYAMSWVRLSPEMRLEWVATISSAGGYIFYSDSVQGRFTISRDNAKNTLHLQMGSLRSGDTAMYYCARQGFGNYGDYYAMDYWGQGTTVTVSSTREQKLISEEDLAKPTTTPAPRPPTPAPTIASQPLSLRPEACRPAAGGAVHTRGLDFACDIYIWAPLAGTCGVLLLSLVITLYCKRGRKKLLYIFKQPFMRPVQTTQEEDGCSCRFPEEEEGGCELRVKFSRSADAPAYQQGQNQLYNELNLGRREEYDVLDKRRGRDPEMGGKPRRKNPQEGLYNELQKDKMAEAYSEIGMKGERRRGKGHDGLYQGLSTATKDTYDALHMQALPPRSSGSGEGRGSLLTCGDVEENPGPHMTEYKPTVRLATRDDVPRAVRTLAAAFADYPATRHTVDPDRHIERVTELQELFLTRVGLDIGKVWVADDGAAVAVWTTPESVEAGAVFAEIGPRMAELSGSRLAAQQQMEGLLAPHRPKEPAWFLATVGVSPDHQGKGLGSAVVLPGVEAAERAGVPAFLETSAPRNLPFYERLGFTVTADVEVPEGPRTWCMTRKPGA

SEQ ID NO: 3413 - protein, 731 aa, Artificial Sequence
  Synthetic Polypeptide
MALPVTALLLPLALLLHAARPDIQMTQSPSSLSASVGDRVTITCRSSQNIVHSNGNTYLDWYQQTPGKAPKLLIYKVSNRFSGVPSRFSGSGSGTDFTFTISSLQPEDIATYYCFQYSHVPWTFGQGTKLQIGGGGSGGGGSGGGGSQVQLQQSGAEVKKPGSSVKVSCKASGYTFTNYYIYWVRQAPGQGLEWIGGINPTSGGSNFNEKFKTRVTITADESSTTAYMELSSLRSEDTAFYFCTRQGLWFDSDGRGFDFWGQGTTVTVSSTREQKLISEEDLAKPTTTPAPRPPTPAPTIASQPLSLRPEACRPAAGGAVHTRGLDFACDIYIWAPLAGTCGVLLLSLVITLYCKRGRKKLLYIFKQPFMRPVQTTQEEDGCSCRFPEEEEGGCELRVKFSRSADAPAYQQGQNQLYNELNLGRREEYDVLDKRRGRDPEMGGKPRRKNPQEGLYNELQKDKMAEAYSEIGMKGERRRGKGHDGLYQGLSTATKDTYDALHMQALPPRSSGSGEGRGSLLTCGDVEENPGPHMTEYKPTVRLATRDDVPRAVRTLAAAFADYPATRHTVDPDRHIERVTELQELFLTRVGLDIGKVWVADDGAAVAVWTTPESVEAGAVFAEIGPRMAELSGSRLAAQQQMEGLLAPHRPKEPAWFLATVGVSPDHQGKGLGSAVVLPGVEAAERAGVPAFLETSAPRNLPFYERLGFTVTADVEVPEGPRTWCMTRKPGA

SEQ ID NO: 3414 - protein, 627 aa, Artificial Sequence
  Synthetic Polypeptide
MALPVTALLLPLALLLHAARPLFNQEVQIPLTESYCGPCPKNWICYKNNCYQFFDESKNWYESQASCMSQNASLLKVYSKEDQDLLKLVKSYHWMGLVHIPTNGSWQWEDGSILSPNLLTIIEMQKGDCALYASSFKGYIENCSTPNTYICMQRTVGGGGSGGGGDTREQKLISEEDLAKPTTTPAPRPPTPAPTIASQPLSLRPEACRPAAGGAVHTRGLDFACDIYIWAPLAGTCGVLLLSLVITLYCKRGRKKLLYIFKQPFMRPVQTTQEEDGCSCRFPEEEEGGCELRVKFSRSADAPAYQQGQNQLYNELNLGRREEYDVLDKRRGRDPEMGGKPRRKNPQEGLYNELQKDKMAEAYSEIGMKGERRRGKGHDGLYQGLSTATKDTYDALHMQALPPRSSGSGEGRGSLLTCGDVEENPGPHMTEYKPTVRLATRDDVPRAVRTLAAAFADYPATRHTVDPDRHIERVTELQELFLTRVGLDIGKVWVADDGAAVAVWTTPESVEAGAVFAEIGPRMAELSGSRLAAQQQMEGLLAPHRPKEPAWFLATVGVSPDHQGKGLGSAVVLPGVEAAERAGVPAFLETSAPRNLPFYERLGFTVTADVEVPEGPRTWCMTRKPGA

SEQ ID NO: 3415 - protein, 721 aa, Artificial Sequence
  Synthetic Polypeptide
MALPVTALLLPLALLLHAARPEIVLTQSPGTLSLSPGERATLSCRASQSVSSSYLAWYQQKPGQAPRLLIYGASSRATGIPDRFSGSGSGTDFTLTISRLEPEDFAVYYCQQYGSSPWTFGQGTKVEIKRGGGGSGGGGSGGGGSQVHLQESGPGLVKPSETLSLTCTVSDDSISSYYWSWIRQPPGKGLEWIGHISYSGSANYNPSLKSRVTISVDTSKNQFSLKLSSVTAADTAVYYCANWDDAFNIWGQGTMVTVSSTREQKLISEEDLAKPTTTPAPRPPTPAPTIASQPLSLRPEACRPAAGGAVHTRGLDFACDIYIWAPLAGTCGVLLLSLVITLYCKRGRKKLLYIFKQPFMRPVQTTQEEDGCSCRFPEEEEGGCELRVKFSRSADAPAYQQGQNQLYNELNLGRREEYDVLDKRRGRDPEMGGKPRRKNPQEGLYNELQKDKMAEAYSEIGMKGERRRGKGHDGLYQGLSTATKDTYDALHMQALPPRSSGSGEGRGSLLTCGDVEENPGPHMTEYKPTVRLATRDDVPRAVRTLAAAFADYPATRHTVDPDRHIERVTELQELFLTRVGLDIGKVWVADDGAAVAVWTTPESVEAGAVFAEIGPRMAELSGSRLAAQQQMEGLLAPHRPKEPAWFLATVGVSPDHQGKGLGSAVVLPGVEAAERAGVPAFLETSAPRNLPFYERLGFTVTADVEVPEGPRTWCMTRKPGA

SEQ ID NO: 3416 - protein, 723 aa, Artificial Sequence
  Synthetic Polypeptide
MALPVTALLLPLALLLHAARPDVVMTQTPLTLSVTIGQPASISCKSSQSLLDSDGKTYLHWLLQRPGQSPKRLIFLVSKLDSGVPDRFTGSGSGTDFTLKISRVEAEDLGVYYCWQGTHFPQTFGGGTKLEIKGGGGSGGGGSGGGGSVQLQESGPDLVKPSQSLSLTCTVTGYSITSGYSWHWIRQFPGNKLEWMGYIHYSGDTDYNPSLKSRFSITRDTSKNQFFLQLNSVTTEDTATYYCATPGGFVYWGQGTLVTVSSTREQKLISEEDLAKPTTTPAPRPPTPAPTIASQPLSLRPEACRPAAGGAVHTRGLDFACDIYIWAPLAGTCGVLLLSLVITLYCKRGRKKLLYIFKQPFMRPVQTTQEEDGCSCRFPEEEEGGCELRVKFSRSADAPAYQQGQNQLYNELNLGRREEYDVLDKRRGRDPEMGGKPRRKNPQEGLYNELQKDKMAEAYSEIGMKGERRRGKGHDGLYQGLSTATKDTYDALHMQALPPRSSGSGEGRGSLLTCGDVEENPGPHMTEYKPTVRLATRDDVPRAVRTLAAAFADYPATRHTVDPDRHIERVTELQELFLTRVGLDIGKVWVADDGAAVAVWTTPESVEAGAVFAEIGPRMAELSGSRLAAQQQMEGLLAPHRPKEPAWFLATVGVSPDHQGKGLGSAVVLPGVEAAERAGVPAFLETSAPRNLPFYERLGFTVTADVEVPEGPRTWCMTRKPGA

SEQ ID NO: 3417 - protein, 727 aa, Artificial Sequence
  Synthetic Polypeptide
MALPVTALLLPLALLLHAARPDQSELTQPRSVSGSPGQSVTISCTGTERDVGGYNYVSWYQQHPGKAPKLIIHDVIERSSGVPDRFSGSKSGNTASLTISGLQAEDEADYYCWSFAGGYYVFGTGTDVTVLGGGGSGGGGSGGGGSFEVQLLESGGGLVQPGGSLRLSCAASGFTFSTYQMSWVRQAPGKGLEWVSGIVSSGGSTAYADSVKGRFTISRDNSKNTLYLQMNSLRAEDTAVYYCAGELLPYYGMDVWGQGTTVTVSSTREQKLISEEDLAKPTTTPAPRPPTPAPTIASQPLSLRPEACRPAAGGAVHTRGLDFACDIYIWAPLAGTCGVLLLSLVITLYCKRGRKKLLYIFKQPFMRPVQTTQEEDGCSCRFPEEEEGGCELRVKFSRSADAPAYQQGQNQLYNELNLGRREEYDVLDKRRGRDPEMGGKPRRKNPQEGLYNELQKDKMAEAYSEIGMKGERRRGKGHDGLYQGLSTATKDTYDALHMQALPPRSSGSGEGRGSLLTCGDVEENPGPHMTEYKPTVRLATRDDVPRAVRTLAAAFADYPATRHTVDPDRHIERVTELQELFLTRVGLDIGKVWVADDGAAVAVWTTPESVEAGAVFAEIGPRMAELSGSRLAAQQQMEGLLAPHRPKEPAWFLATVGVSPDHQGKGLGSAVVLPGVEAAERAGVPAFLETSAPRNLPFYERLGFTVTADVEVPEGPRTWCMTRKPGA

SEQ ID NO: 3418 - protein, 726 aa, Artificial Sequence
  Synthetic Polypeptide
MALPVTALLLPLALLLHAARPDQSELTQPRSVSGSPGQSVTISCTGTERDVGGYNYVSWYQQHPGKAPKLIIHDVIERSSGVPDRFSGSKSGNTASLTISGLQAEDEADYYCWSFAGGYYVFGTGTDVTVLGGGGSGGGGSGGGGSEVQLLESGGGLVQPGGSLRLSCAASGFTFSTYEMHWVRQAPGKGLEWVSVILSSGGETNYADSVKGRFTISRDNSKNTLYLQMNSLRAEDTAVYYCAGMLLPYYGMDVWGQGTTVTVSSTREQKLISEEDLAKPTTTPAPRPPTPAPTIASQPLSLRPEACRPAAGGAVHTRGLDFACDIYIWAPLAGTCGVLLLSLVITLYCKRGRKKLLYIFKQPFMRPVQTTQEEDGCSCRFPEEEEGGCELRVKFSRSADAPAYQQGQNQLYNELNLGRREEYDVLDKRRGRDPEMGGKPRRKNPQEGLYNELQKDKMAEAYSEIGMKGERRRGKGHDGLYQGLSTATKDTYDALHMQALPPRSSGSGEGRGSLLTCGDVEENPGPHMTEYKPTVRLATRDDVPRAVRTLAAAFADYPATRHTVDPDRHIERVTELQELFLTRVGLDIGKVWVADDGAAVAVWTTPESVEAGAVFAEIGPRMAELSGSRLAAQQQMEGLLAPHRPKEPAWFLATVGVSPDHQGKGLGSAVVLPGVEAAERAGVPAFLETSAPRNLPFYERLGFTVTADVEVPEGPRTWCMTRKPGA

SEQ ID NO: 3419 - protein, 628 aa, Artificial Sequence
  Synthetic Polypeptide
MALPVTALLLPLALLLHAARPGWFLDSPDRPWNPPTFSPALLVVTEGDNATFTCSFSNTSESFVLNWYRMSPSNQTDKLAAFPEDRSQPGQDCRFRVTQLPNGRDFHMSVVRARRNDSGTYLCGAISLAPKAQIKESLRAELRVTERRAEVPTAHPSPSPRPAGQFQTREQKLISEEDLAKPTTTPAPRPPTPAPTIASQPLSLRPEACRPAAGGAVHTRGLDFACDIYIWAPLAGTCGVLLLSLVITLYCKRGRKKLLYIFKQPFMRPVQTTQEEDGCSCRFPEEEEGGCELRVKFSRSADAPAYQQGQNQLYNELNLGRREEYDVLDKRRGRDPEMGGKPRRKNPQEGLYNELQKDKMAEAYSEIGMKGERRRGKGHDGLYQGLSTATKDTYDALHMQALPPRSSGSGEGRGSLLTCGDVEENPGPHMTEYKPTVRLATRDDVPRAVRTLAAAFADYPATRHTVDPDRHIERVTELQELFLTRVGLDIGKVWVADDGAAVAVWTTPESVEAGAVFAEIGPRMAELSGSRLAAQQQMEGLLAPHRPKEPAWFLATVGVSPDHQGKGLGSAVVLPGVEAAERAGVPAFLETSAPRNLPFYERLGFTVTADVEVPEGPRTWCMTRKPGA

SEQ ID NO: 3420 - protein, 723 aa, Artificial Sequence
  Synthetic Polypeptide
MALPVTALLLPLALLLHAARPDIQMTQSPSSLSASVGDRVTITCRASQDVSTAVAWYQQKPGKAPKLLIYSASFLYSGVPSRFSGSGSGTDFTLTISSLQPEDFATYYCQQYLYHPATFGQGTKVEIKRGGGGSGGGGSGGGGSEVQLVESGGGLVQPGGSLRLSCAASGFTFSDSWIHWVRQAPGKGLEWVAWISPYGGSTYYADSVKGRFTISADTSKNTAYLQMNSLRAEDTAVYYCARRHWPGGFDYWGQGTLVTVSSTREQKLISEEDLAKPTTTPAPRPPTPAPTIASQPLSLRPEACRPAAGGAVHTRGLDFACDIYIWAPLAGTCGVLLLSLVITLYCKRGRKKLLYIFKQPFMRPVQTTQEEDGCSCRFPEEEEGGCELRVKFSRSADAPAYQQGQNQLYNELNLGRREEYDVLDKRRGRDPEMGGKPRRKNPQEGLYNELQKDKMAEAYSEIGMKGERRRGKGHDGLYQGLSTATKDTYDALHMQALPPRSSGSGEGRGSLLTCGDVEENPGPHMTEYKPTVRLATRDDVPRAVRTLAAAFADYPATRHTVDPDRHIERVTELQELFLTRVGLDIGKVWVADDGAAVAVWTTPESVEAGAVFAEIGPRMAELSGSRLAAQQQMEGLLAPHRPKEPAWFLATVGVSPDHQGKGLGSAVVLPGVEAAERAGVPAFLETSAPRNLPFYERLGFTVTADVEVPEGPRTWCMTRKPGA

SEQ ID NO: 3421 - protein, 724 aa, Artificial Sequence
  Synthetic Polypeptide
MALPVTALLLPLALLLHAARPAIVMTQTPSPVSAAVGGTVTINCQASESVYSNNYLSWFQQKPGQPPKLLIYLASTLASGVPSRFKGSGSGTQFTLTISGVQCDDAATYYCIGGKSSSTDGNAFGGGTEVVVRGGGGSGGGGSGGGGSQSLEESGGRLVKPDETLTITCTVSGIDLSSNGLTWVRQAPGEGLEWIGTINKDASAYYASWAKGRLTISKPSSTKVDLKITSPTTEDTATYFCGRIAFKTGTSIWGPGTLVTVSSTREQKLISEEDLAKPTTTPAPRPPTPAPTIASQPLSLRPEACRPAAGGAVHTRGLDFACDIYIWAPLAGTCGVLLLSLVITLYCKRGRKKLLYIFKQPFMRPVQTTQEEDGCSCRFPEEEEGGCELRVKFSRSADAPAYQQGQNQLYNELNLGRREEYDVLDKRRGRDPEMGGKPRRKNPQEGLYNELQKDKMAEAYSEIGMKGERRRGKGHDGLYQGLSTATKDTYDALHMQALPPRSSGSGEGRGSLLTCGDVEENPGPHMTEYKPTVRLATRDDVPRAVRTLAAAFADYPATRHTVDPDRHIERVTELQELFLTRVGLDIGKVWVADDGAAVAVWTTPESVEAGAVFAEIGPRMAELSGSRLAAQQQMEGLLAPHRPKEPAWFLATVGVSPDHQGKGLGSAVVLPGVEAAERAGVPAFLETSAPRNLPFYERLGFTVTADVEVPEGPRTWCMTRKPGA

SEQ ID NO: 3422 - protein, 722 aa, Artificial Sequence
  Synthetic Polypeptide
MALPVTALLLPLALLLHAARPDIQMTQSPSSLSASVGDRVTITCRASQGISSWLAWYQQKPEKAPKSLIYAASSLQSGVPSRFSGSGSGTDFTLTISSLQPEDFATYYCQQYNSYPYTFGQGTKLEIKGGGGSGGGGSGGGGSQVQLVQSGAEVKKPGASVKVSCKASGYTFTSYDVHWVRQAPGQRLEWMGWLHADTGITKFSQKFQGRVTITRDTSASTAYMELSSLRSEDTAVYYCARERIQLWFDYWGQGTLVTVSSTREQKLISEEDLAKPTTTPAPRPPTPAPTIASQPLSLRPEACRPAAGGAVHTRGLDFACDIYIWAPLAGTCGVLLLSLVITLYCKRGRKKLLYIFKQPFMRPVQTTQEEDGCSCRFPEEEEGGCELRVKFSRSADAPAYQQGQNQLYNELNLGRREEYDVLDKRRGRDPEMGGKPRRKNPQEGLYNELQKDKMAEAYSEIGMKGERRRGKGHDGLYQGLSTATKDTYDALHMQALPPRSSGSGEGRGSLLTCGDVEENPGPHMTEYKPTVRLATRDDVPRAVRTLAAAFADYPATRHTVDPDRHIERVTELQELFLTRVGLDIGKVWVADDGAAVAVWTTPESVEAGAVFAEIGPRMAELSGSRLAAQQQMEGLLAPHRPKEPAWFLATVGVSPDHQGKGLGSAVVLPGVEAAERAGVPAFLETSAPRNLPFYERLGFTVTADVEVPEGPRTWCMTRKPGA

SEQ ID NO: 3423 - protein, 741 aa, Artificial Sequence
  Synthetic Polypeptide
MALPVTALLLPLALLLHAARPDDIVMTQSPLSLPVTPGEPASISCRSSQSLLHSNGYNYLVWYLQKPGQSPQLLIYLGSIRASGVPDRFSGSGSGTDFTLKISRVEAEDVGVYYCMQPLQTPITFGQGTRLEIKRGGGGSGGGGSGGGGSGLQCVAAPRWVLSQVQLQQWGAGLLKPSETLSLTCAVYGGSFSGNYWSWIRQPPGKGLEWIGEINHSGSTNYNPSLKSRVTISVDTSKNQFSLKLSSVTAADTAVYYCARGGSYNYFDYWGQGTLVTVSSTREQKLISEEDLAKPTTTPAPRPPTPAPTIASQPLSLRPEACRPAAGGAVHTRGLDFACDIYIWAPLAGTCGVLLLSLVITLYCKRGRKKLLYIFKQPFMRPVQTTQEEDGCSCRFPEEEEGGCELRVKFSRSADAPAYQQGQNQLYNELNLGRREEYDVLDKRRGRDPEMGGKPRRKNPQEGLYNELQKDKMAEAYSEIGMKGERRRGKGHDGLYQGLSTATKDTYDALHMQALPPRSSGSGEGRGSLLTCGDVEENPGPHMTEYKPTVRLATRDDVPRAVRTLAAAFADYPATRHTVDPDRHIERVTELQELFLTRVGLDIGKVWVADDGAAVAVWTTPESVEAGAVFAEIGPRMAELSGSRLAAQQQMEGLLAPHRPKEPAWFLATVGVSPDHQGKGLGSAVVLPGVEAAERAGVPAFLETSAPRNLPFYERLGFTVTADVEVPEGPRTWCMTRKPGA

SEQ ID NO: 3424 - protein, 738 aa, Artificial Sequence
  Synthetic Polypeptide
MALPVTALLLPLALLLHAARPDQLTQSPSSVSASVGDRVTITCRASRGISSWLAWYQQKPGKAPKLLIYTASSLQSGVPSRFSGSGSGTDFTLTISSLQPEDFATYYCQQAYSFPRTFGQGTKVEIKRGGGGSGGGGSGGGGSVAAPRWVLSQVQLQESGPGLVKPSQTLSLTCTVSGGSISSGGYYWIWIRQHPGKGLEWIGYIYYNGNTYYNPSLKSRVTMSVDTSKNQFSLKLSSVTAADTAVYYCARDGITMIRGYYYGMDVWGQGTTVTVSSTREQKLISEEDLAKPTTTPAPRPPTPAPTIASQPLSLRPEACRPAAGGAVHTRGLDFACDIYIWAPLAGTCGVLLLSLVITLYCKRGRKKLLYIFKQPFMRPVQTTQEEDGCSCRFPEEEEGGCELRVKFSRSADAPAYQQGQNQLYNELNLGRREEYDVLDKRRGRDPEMGGKPRRKNPQEGLYNELQKDKMAEAYSEIGMKGERRRGKGHDGLYQGLSTATKDTYDALHMQALPPRSSGSGEGRGSLLTCGDVEENPGPHMTEYKPTVRLATRDDVPRAVRTLAAAFADYPATRHTVDPDRHIERVTELQELFLTRVGLDIGKVWVADDGAAVAVWTTPESVEAGAVFAEIGPRMAELSGSRLAAQQQMEGLLAPHRPKEPAWFLATVGVSPDHQGKGLGSAVVLPGVEAAERAGVPAFLETSAPRNLPFYERLGFTVTADVEVPEGPRTWCMTRKPGA

SEQ ID NO: 3425 - protein, 712 aa, Artificial Sequence
  Synthetic Polypeptide
MALPVTALLLPLALLLHAARPDIVVTQSPASLAVSLGQRATISYRASKSVSTSGYSYMHWNQQKPGQPPRLLIYLVSNLESGVPARFSGSGSGTDFTLNIHPVEEEDAATYYCQHIRELTRSEGGPSWKGGGGSGGGGSGGGGSEVKLEESGGDLVKPGGSLKLSCAASGFTFSGYGMSWVRQTPDKRLEWVATISSGGSYTYYPDSVKGRFTISRDNAKNTLYLQMSSLKSEDTAMYYCARHEGGYYGSSTREQKLISEEDLAKPTTTPAPRPPTPAPTIASQPLSLRPEACRPAAGGAVHTRGLDFACDIYIWAPLAGTCGVLLLSLVITLYCKRGRKKLLYIFKQPFMRPVQTTQEEDGCSCRFPEEEEGGCELRVKFSRSADAPAYQQGQNQLYNELNLGRREEYDVLDKRRGRDPEMGGKPRRKNPQEGLYNELQKDKMAEAYSEIGMKGERRRGKGHDGLYQGLSTATKDTYDALHMQALPPRSSGSGEGRGSLLTCGDVEENPGPHMTEYKPTVRLATRDDVPRAVRTLAAAFADYPATRHTVDPDRHIERVTELQELFLTRVGLDIGKVWVADDGAAVAVWTTPESVEAGAVFAEIGPRMAELSGSRLAAQQQMEGLLAPHRPKEPAWFLATVGVSPDHQGKGLGSAVVLPGVEAAERAGVPAFLETSAPRNLPFYERLGFTVTADVEVPEGPRTWCMTRKPGA

SEQ ID NO: 3426 - protein, 728 aa, Artificial Sequence
  Synthetic Polypeptide
MALPVTALLLPLALLLHAARPDDIQMTQSPSSLSASVGDRVTITCRASQGISNYLAWYQQKTGKVPKFLIYEASTLQSGVPSRFSGGGSGTDFTLTISSLQPEDVATYYCQNYNSAPFTFGPGTKVDIKGGGGSGGGGSGGGGSQVQLVESGGGVVQPGRSLRLSCAASGFAFSRYGMHWVRQAPGKGLEWVAVIWYDGSNKYYADSVKGRFTISRDNSKNTQYLQMNSLRAEDTAVYYCARGGDFLYYYYYGMDVWGQGTTVTVSSTREQKLISEEDLAKPTTTPAPRPPTPAPTIASQPLSLRPEACRPAAGGAVHTRGLDFACDIYIWAPLAGTCGVLLLSLVITLYCKRGRKKLLYIFKQPFMRPVQTTQEEDGCSCRFPEEEEGGCELRVKFSRSADAPAYQQGQNQLYNELNLGRREEYDVLDKRRGRDPEMGGKPRRKNPQEGLYNELQKDKMAEAYSEIGMKGERRRGKGHDGLYQGLSTATKDTYDALHMQALPPRSSGSGEGRGSLLTCGDVEENPGPHMTEYKPTVRLATRDDVPRAVRTLAAAFADYPATRHTVDPDRHIERVTELQELFLTRVGLDIGKVWVADDGAAVAVWTTPESVEAGAVFAEIGPRMAELSGSRLAAQQQMEGLLAPHRPKEPAWFLATVGVSPDHQGKGLGSAVVLPGVEAAERAGVPAFLETSAPRNLPFYERLGFTVTADVEVPEGPRTWCMTRKPGA

SEQ ID NO: 3427 - protein, 719 aa, Artificial Sequence
  Synthetic Polypeptide
MALPVTALLLPLALLLHAARPDIQMTQSPSSLSTSVGDRVTLTCKASQDVGTAVDWYQQKPGPSPKLLIYWASTRHTGIPSRFSGSGSGTDFTLTISSLQPEDFADYYCQQYNSYPLTFGPGTKVDIKGGGGSGGGGSGGGGSEVQLVQSGPEVKKPGATVKISCKTSGYTFTEYTIHWVKQAPGKGLEWIGNINPNNGGTTYNQKFEDKATLTVDKSTDTAYMELSSLRSEDTAVYYCAAGWNFDYWGQGTLLTVSSTREQKLISEEDLAKPTTTPAPRPPTPAPTIASQPLSLRPEACRPAAGGAVHTRGLDFACDIYIWAPLAGTCGVLLLSLVITLYCKRGRKKLLYIFKQPFMRPVQTTQEEDGCSCRFPEEEEGGCELRVKFSRSADAPAYQQGQNQLYNELNLGRREEYDVLDKRRGRDPEMGGKPRRKNPQEGLYNELQKDKMAEAYSEIGMKGERRRGKGHDGLYQGLSTATKDTYDALHMQALPPRSSGSGEGRGSLLTCGDVEENPGPHMTEYKPTVRLATRDDVPRAVRTLAAAFADYPATRHTVDPDRHIERVTELQELFLTRVGLDIGKVWVADDGAAVAVWTTPESVEAGAVFAEIGPRMAELSGSRLAAQQQMEGLLAPHRPKEPAWFLATVGVSPDHQGKGLGSAVVLPGVEAAERAGVPAFLETSAPRNLPFYERLGFTVTADVEVPEGPRTWCMTRKPGA

SEQ ID NO: 3428 - protein, 720 aa, Artificial Sequence
  Synthetic Polypeptide
MALPVTALLLPLALLLHAARPDIQMTQSPSSLSASVGDRVTITCKASQDIYPYLNWFQQKPGKAPKTLIYRTNRLLDGVPSRFSGSGSGTDFTFTISSLQPYYCLQYDEFPLTFGAGTKLEIKRGGGGSGGGGSGGGGSQITLKESGPTLVKPTQTLTLTCTFSGFSLSTSNMGVGWIRQPPGKALEWLAHIWWDDDKYYSPSLKSRLTITKDTSKNQVVLTMTNMDPVDTATYYCVRSNYGYAWFAYWGQGTLVTVSSTREQKLISEEDLAKPTTTPAPRPPTPAPTIASQPLSLRPEACRPAAGGAVHTRGLDFACDIYIWAPLAGTCGVLLLSLVITLYCKRGRKKLLYIFKQPFMRPVQTTQEEDGCSCRFPEEEEGGCELRVKFSRSADAPAYQQGQNQLYNELNLGRREEYDVLDKRRGRDPEMGGKPRRKNPQEGLYNELQKDKMAEAYSEIGMKGERRRGKGHDGLYQGLSTATKDTYDALHMQALPPRSSGSGEGRGSLLTCGDVEENPGPHMTEYKPTVRLATRDDVPRAVRTLAAAFADYPATRHTVDPDRHIERVTELQELFLTRVGLDIGKVWVADDGAAVAVWTTPESVEAGAVFAEIGPRMAELSGSRLAAQQQMEGLLAPHRPKEPAWFLATVGVSPDHQGKGLGSAVVLPGVEAAERAGVPAFLETSAPRNLPFYERLGFTVTADVEVPEGPRTWCMTRKPGA

SEQ ID NO: 3429 - protein, 720 aa, Artificial Sequence
  Synthetic Polypeptide
MALPVTALLLPLALLLHAARPDIVMTQSQKFMSTSVGDRVNVTCKASQNVGTNVVWYQQKTGQSPKALIHSASYRYSGVPDRFTGSGSGTDFTLTLSNVQSEDLAEYFCQHYNSFPYTFGGGTKLEIKRGGGGSGGGGSGGGGSQVQLQQSGAELVRPGVSVKISCKGSGYRFTDYPIHWVKQSHAKSLEWIGIISTYYGDVTNNPKFRGKATMTVDKSSTTAYMELARLTSEDSAIYYCARNDLFAYWGQGTLVTVSATREQKLISEEDLAKPTTTPAPRPPTPAPTIASQPLSLRPEACRPAAGGAVHTRGLDFACDIYIWAPLAGTCGVLLLSLVITLYCKRGRKKLLYIFKQPFMRPVQTTQEEDGCSCRFPEEEEGGCELRVKFSRSADAPAYQQGQNQLYNELNLGRREEYDVLDKRRGRDPEMGGKPRRKNPQEGLYNELQKDKMAEAYSEIGMKGERRRGKGHDGLYQGLSTATKDTYDALHMQALPPRSSGSGEGRGSLLTCGDVEENPGPHMTEYKPTVRLATRDDVPRAVRTLAAAFADYPATRHTVDPDRHIERVTELQELFLTRVGLDIGKVWVADDGAAVAVWTTPESVEAGAVFAEIGPRMAELSGSRLAAQQQMEGLLAPHRPKEPAWFLATVGVSPDHQGKGLGSAVVLPGVEAAERAGVPAFLETSAPRNLPFYERLGFTVTADVEVPEGPRTWCMTRKPGA

SEQ ID NO: 3430 - protein, 723 aa, Artificial Sequence
  Synthetic Polypeptide
MALPVTALLLPLALLLHAARPDIKMTQSPSSMYASLGERVTITCKASPDINSYLSWFQQKPGKSPKTLIYRANRLVDGVPSRFSGGGSGQDYSLTINSLEYEDMGIYYCLQYDEFPYTFGGGTKLEMKGGGGSGGGGSGGGGSEVKLVESGGGLVKPGGSLKLSCAASGFTFSSYAMSWVRQIPEKRLEWVASISRGGTTYYPDSVKGRFTISRDNVRNILYLQMSSLRSEDTAMYYCGRYDYDGYYAMDYWGQGTSVTVSSTREQKLISEEDLAKPTTTPAPRPPTPAPTIASQPLSLRPEACRPAAGGAVHTRGLDFACDIYIWAPLAGTCGVLLLSLVITLYCKRGRKKLLYIFKQPFMRPVQTTQEEDGCSCRFPEEEEGGCELRVKFSRSADAPAYQQGQNQLYNELNLGRREEYDVLDKRRGRDPEMGGKPRRKNPQEGLYNELQKDKMAEAYSEIGMKGERRRGKGHDGLYQGLSTATKDTYDALHMQALPPRSSGSGEGRGSLLTCGDVEENPGPHMTEYKPTVRLATRDDVPRAVRTLAAAFADYPATRHTVDPDRHIERVTELQELFLTRVGLDIGKVWVADDGAAVAVWTTPESVEAGAVFAEIGPRMAELSGSRLAAQQQMEGLLAPHRPKEPAWFLATVGVSPDHQGKGLGSAVVLPGVEAAERAGVPAFLETSAPRNLPFYERLGFTVTADVEVPEGPRTWCMTRKPGA

SEQ ID NO: 3431 - protein, 726 aa, Artificial Sequence
  Synthetic Polypeptide
MALPVTALLLPLALLLHAARPDDVVVTPVSCFLSCISGAEGHHLIQGQQKCQYIWLLYALEPTETRTATQTPHLSCIQPRIWGPCQVQWQWVWDRLHPQHPSCGGGGCCNLLLSAHGAYTFGGGTRLELKGGGGSGGGGSGGGGSEVKLQESGPELVKPGASVKMSCKASGYTFTSYVMHWVKQKPGQGLEWIGYINPYNDGTKYNEKFKGKATLTSDKSSSTAYMELSSLTSEDSAVYYCARWKIYYGNYEDYWGQGTPLTVSSTREQKLISEEDLAKPTTTPAPRPPTPAPTIASQPLSLRPEACRPAAGGAVHTRGLDFACDIYIWAPLAGTCGVLLLSLVITLYCKRGRKKLLYIFKQPFMRPVQTTQEEDGCSCRFPEEEEGGCELRVKFSRSADAPAYQQGQNQLYNELNLGRREEYDVLDKRRGRDPEMGGKPRRKNPQEGLYNELQKDKMAEAYSEIGMKGERRRGKGHDGLYQGLSTATKDTYDALHMQALPPRSSGSGEGRGSLLTCGDVEENPGPHMTEYKPTVRLATRDDVPRAVRTLAAAFADYPATRHTVDPDRHIERVTELQELFLTRVGLDIGKVWVADDGAAVAVWTTPESVEAGAVFAEIGPRMAELSGSRLAAQQQMEGLLAPHRPKEPAWFLATVGVSPDHQGKGLGSAVVLPGVEAAERAGVPAFLETSAPRNLPFYERLGFTVTADVEVPEGPRTWCMTRKPGA

SEQ ID NO: 3432 - protein, 756 aa, Artificial Sequence
  Synthetic Polypeptide
MALPVTALLLPLALLLHAARPDEFQVQLVQSGGGLVQPGGSLRLSCAASDFDFAAYEMSWVRQAPGQGLEWVAIISHDGIDKYYTDSVKGRFTISRDNSKNTLYLQMNTLRAEDTATYYCLRLGAVGQGTLVTVSSLEGGGGSGGGGSGGGGSGSGGSGSGGSGSGGSGSGGSFEQVQLVQSGGGLVQPGGSLRLSCAASDFAFDDYEMSWVRQAPGKALEWIGDINHSGTTIYNPSLKSRVTISRDNSKNTLYLQMNTLRAEDTAIYYCARPHYGDYSDAFDIWGQGTMVTVSSTREQKLISEEDLAKPTTTPAPRPPTPAPTIASQPLSLRPEACRPAAGGAVHTRGLDFACDIYIWAPLAGTCGVLLLSLVITLYCKRGRKKLLYIFKQPFMRPVQTTQEEDGCSCRFPEEEEGGCELRVKFSRSADAPAYQQGQNQLYNELNLGRREEYDVLDKRRGRDPEMGGKPRRKNPQEGLYNELQKDKMAEAYSEIGMKGERRRGKGHDGLYQGLSTATKDTYDALHMQALPPRSSGSGEGRGSLLTCGDVEENPGPHMTEYKPTVRLATRDDVPRAVRTLAAAFADYPATRHTVDPDRHIERVTELQELFLTRVGLDIGKVWVADDGAAVAVWTTPESVEAGAVFAEIGPRMAELSGSRLAAQQQMEGLLAPHRPKEPAWFLATVGVSPDHQGKGLGSAVVLPGVEAAERAGVPAFLETSAPRNLPFYERLGFTVTADVEVPEGPRTWCMTRKPGA

SEQ ID NO: 3433 - protein, 731 aa, Artificial Sequence
  Synthetic Polypeptide
MALPVTALLLPLALLLHAARPEIVMTQSPATLSVSPGERATLSCRASQSVSSNLAWYQQKPGQAPRLLIYGASTRATGIPARFSGSGSGTDFTLTISSLQSVDSAVYYCQQYNNWPPYTFGQGTKLEIKGGGGSGGGGSGGGGSQVQLLESGGGVVQPGRSLRLSCAASGFTFSFYGMHWVRQAPGKGLEWVAAISYDGSNKYYADSVKGRFTISRDNSKNTLYLQMNSLRAEDTAVYYCAKRPNQFYCSDGRCYSIDYWGQGTLVTVSSTREQKLISEEDLAKPTTTPAPRPPTPAPTIASQPLSLRPEACRPAAGGAVHTRGLDFACDIYIWAPLAGTCGVLLLSLVITLYCKRGRKKLLYIFKQPFMRPVQTTQEEDGCSCRFPEEEEGGCELRVKFSRSADAPAYQQGQNQLYNELNLGRREEYDVLDKRRGRDPEMGGKPRRKNPQEGLYNELQKDKMAEAYSEIGMKGERRRGKGHDGLYQGLSTATKDTYDALHMQALPPRSSGSGEGRGSLLTCGDVEENPGPHMTEYKPTVRLATRDDVPRAVRTLAAAFADYPATRHTVDPDRHIERVTELQELFLTRVGLDIGKVWVADDGAAVAVWTTPESVEAGAVFAEIGPRMAELSGSRLAAQQQMEGLLAPHRPKEPAWFLATVGVSPDHQGKGLGSAVVLPGVEAAERAGVPAFLETSAPRNLPFYERLGFTVTADVEVPEGPRTWCMTRKPGA

SEQ ID NO: 3434 - protein, 727 aa, Artificial Sequence
  Synthetic Polypeptide
MALPVTALLLPLALLLHAARPQSVLTQPPSASAGGTPGQRVTISCSGSSSNIGSNFVYWYQQLPGTAPKLLIYRNNQRPSGVPDRFSGSRSGTSASLAGLRSEDEADYYCAADSLGGHYVFGTGTKVLGGGGSGGGGSGGGGSQVQLVESGGGSVQPGRSLRLSCEASGFTFEAYAMHWVRQPPGKGLEWVSSINWNSGRIAYADSVKGRFTISRDNARNSLYLQMNSLRLEDTAFYYCAKDIRRFSTGGAEFEYWGQGTLVTVSSTREQKLISEEDLAKPTTTPAPRPPTPAPTIASQPLSLRPEACRPAAGGAVHTRGLDFACDIYIWAPLAGTCGVLLLSLVITLYCKRGRKKLLYIFKQPFMRPVQTTQEEDGCSCRFPEEEEGGCELRVKFSRSADAPAYQQGQNQLYNELNLGRREEYDVLDKRRGRDPEMGGKPRRKNPQEGLYNELQKDKMAEAYSEIGMKGERRRGKGHDGLYQGLSTATKDTYDALHMQALPPRSSGSGEGRGSLLTCGDVEENPGPHMTEYKPTVRLATRDDVPRAVRTLAAAFADYPATRHTVDPDRHIERVTELQELFLTRVGLDIGKVWVADDGAAVAVWTTPESVEAGAVFAEIGPRMAELSGSRLAAQQQMEGLLAPHRPKEPAWFLATVGVSPDHQGKGLGSAVVLPGVEAAERAGVPAFLETSAPRNLPFYERLGFTVTADVEVPEGPRTWCMTRKPGA

SEQ ID NO: 3435 - protein, 722 aa, Artificial Sequence
  Synthetic Polypeptide
MALPVTALLLPLALLLHAARPENVLTQSPAIMSASPGEKVTMTCSASSSVSYMHWYQQKSSTSPKLWIYDTSKLASGVPGRFSGSGSGNSYSLTISSMEAEDVATYYCFQGSGYPLTFGAGTKLELKGGGGSGGGGSGGGGSQVQLKESGPGLVAPSQSLSITCTVSGFSLSSQGVYWVRQPPGKGLEWLGAIWAGGSTNYNSALMSRLSISKDNSKSQVFLKMNSLQTDDTAMYYCARVDGYRGYNMDYWGQGTSVTVSSTREQKLISEEDLAKPTTTPAPRPPTPAPTIASQPLSLRPEACRPAAGGAVHTRGLDFACDIYIWAPLAGTCGVLLLSLVITLYCKRGRKKLLYIFKQPFMRPVQTTQEEDGCSCRFPEEEEGGCELRVKFSRSADAPAYQQGQNQLYNELNLGRREEYDVLDKRRGRDPEMGGKPRRKNPQEGLYNELQKDKMAEAYSEIGMKGERRRGKGHDGLYQGLSTATKDTYDALHMQALPPRSSGSGEGRGSLLTCGDVEENPGPHMTEYKPTVRLATRDDVPRAVRTLAAAFADYPATRHTVDPDRHIERVTELQELFLTRVGLDIGKVWVADDGAAVAVWTTPESVEAGAVFAEIGPRMAELSGSRLAAQQQMEGLLAPHRPKEPAWFLATVGVSPDHQGKGLGSAVVLPGVEAAERAGVPAFLETSAPRNLPFYERLGFTVTADVEVPEGPRTWCMTRKPGA

SEQ ID NO: 3436 - protein, 726 aa, Artificial Sequence
  Synthetic Polypeptide
MALPVTALLLPLALLLHAARPDDIQMTQSPSSLSASVGDRVTITCRASQSISSYLNWYQQKPGKAPKLLIYDASNLETGVPSRFSGSGSGTDFTFTISSLQPEDIATYYCQQYDNLPLTFGGGTKVDIKRGGGGSGGGGSGGGGSQVQLVESGGGVVQPGRSLRLSCAASGFTFSSYAMHWVRQAPGKGLEWVAVISYDGSNKYYADSVKGRFTISRDNSKNTLYLQMNSLRAEDTAVYYCARAHNSSSWSFDYWGQGTLVTVSSTREQKLISEEDLAKPTTTPAPRPPTPAPTIASQPLSLRPEACRPAAGGAVHTRGLDFACDIYIWAPLAGTCGVLLLSLVITLYCKRGRKKLLYIFKQPFMRPVQTTQEEDGCSCRFPEEEEGGCELRVKFSRSADAPAYQQGQNQLYNELNLGRREEYDVLDKRRGRDPEMGGKPRRKNPQEGLYNELQKDKMAEAYSEIGMKGERRRGKGHDGLYQGLSTATKDTYDALHMQALPPRSSGSGEGRGSLLTCGDVEENPGPHMTEYKPTVRLATRDDVPRAVRTLAAAFADYPATRHTVDPDRHIERVTELQELFLTRVGLDIGKVWVADDGAAVAVWTTPESVEAGAVFAEIGPRMAELSGSRLAAQQQMEGLLAPHRPKEPAWFLATVGVSPDHQGKGLGSAVVLPGVEAAERAGVPAFLETSAPRNLPFYERLGFTVTADVEVPEGPRTWCMTRKPGA

SEQ ID NO: 3437 - protein, 735 aa, Artificial Sequence
  Synthetic Polypeptide
MALPVTALLLPLALLLHAARPDDVVMTQSPLSLPVSLGDQASISCRSSQRLVHSNGNTYLHWYLQKPGQSPKLLIYRVSNRFPGVPDRFSGSGSGTDFTLKISRVEAEDLGIYFCSQSTHVPYTFGGGTKLEIKRGGGGSGGGGSGGGGSEVRLQQSGPDLIKPGASVKMSCKASGYTFTGYVMHWVKQRPGQGLEWIGFINPYNDDIQSNERFRGKATLTSDKSSTTAYMELSSLTSEDSAVYYCARGAGYNFDGAYRFFDFWGQGTTLTVSSTREQKLISEEDLAKPTTTPAPRPPTPAPTIASQPLSLRPEACRPAAGGAVHTRGLDFACDIYIWAPLAGTCGVLLLSLVITLYCKRGRKKLLYIFKQPFMRPVQTTQEEDGCSCRFPEEEEGGCELRVKFSRSADAPAYQQGQNQLYNELNLGRREEYDVLDKRRGRDPEMGGKPRRKNPQEGLYNELQKDKMAEAYSEIGMKGERRRGKGHDGLYQGLSTATKDTYDALHMQALPPRSSGSGEGRGSLLTCGDVEENPGPHMTEYKPTVRLATRDDVPRAVRTLAAAFADYPATRHTVDPDRHIERVTELQELFLTRVGLDIGKVWVADDGAAVAVWTTPESVEAGAVFAEIGPRMAELSGSRLAAQQQMEGLLAPHRPKEPAWFLATVGVSPDHQGKGLGSAVVLPGVEAAERAGVPAFLETSAPRNLPFYERLGFTVTADVEVPEGPRTWCMTRKPGA

SEQ ID NO: 3438 - protein, 726 aa, Artificial Sequence
  Synthetic Polypeptide
MALPVTALLLPLALLLHAARPDSYELTQPPSVSVSPGQTATISCSGDQLGGKYGHWYQKKPGQSPVLVLYQDRKRPAGIPERFSGSSSGNTITLTISGTQAVDEADYYCQAWDTNLGGVFGGGTKVTVLGQGGGGSGGGGSGGGGSQVQLVESGAEVKKPGASVKVSCKASGYTFTGYYMHWVRQAPGQGLEWMGRINPNSGGTNYAQKFQGRVTMTRDTSISTAYMELSRLRSDDTAVYYCASPRGRGSAFDIWGQGTLVTVSSTREQKLISEEDLAKPTTTPAPRPPTPAPTIASQPLSLRPEACRPAAGGAVHTRGLDFACDIYIWAPLAGTCGVLLLSLVITLYCKRGRKKLLYIFKQPFMRPVQTTQEEDGCSCRFPEEEEGGCELRVKFSRSADAPAYQQGQNQLYNELNLGRREEYDVLDKRRGRDPEMGGKPRRKNPQEGLYNELQKDKMAEAYSEIGMKGERRRGKGHDGLYQGLSTATKDTYDALHMQALPPRSSGSGEGRGSLLTCGDVEENPGPHMTEYKPTVRLATRDDVPRAVRTLAAAFADYPATRHTVDPDRHIERVTELQELFLTRVGLDIGKVWVADDGAAVAVWTTPESVEAGAVFAEIGPRMAELSGSRLAAQQQMEGLLAPHRPKEPAWFLATVGVSPDHQGKGLGSAVVLPGVEAAERAGVPAFLETSAPRNLPFYERLGFTVTADVEVPEGPRTWCMTRKPGA

SEQ ID NO: 3439 - protein, 729 aa, Artificial Sequence
  Synthetic Polypeptide
MALPVTALLLPLALLLHAARPDNFMLTQPHSVSESPGKTVTISCTRSSGSIASKYVQWYQQRPGSSPTTVIYEDNQRPSGVPDRFSGSIDTSSNSASLTISGLRTEDEADYYCHSYDSNNHSVFGGGTKVTVLGQGGGGSGGGGSGGGGSEVQLVESGGGVVQPGGSLRLSCAASGFTFSSYAMSWVRQAPGKGLEWVSAISGSGGSTYYADSVKGRFSISRDNSKNTLYLQMNSLRAEDTAVYYCARTRSSGAFDIWGQGTLVTVSSTREQKLISEEDLAKPTTTPAPRPPTPAPTIASQPLSLRPEACRPAAGGAVHTRGLDFACDIYIWAPLAGTCGVLLLSLVITLYCKRGRKKLLYIFKQPFMRPVQTTQEEDGCSCRFPEEEEGGCELRVKFSRSADAPAYQQGQNQLYNELNLGRREEYDVLDKRRGRDPEMGGKPRRKNPQEGLYNELQKDKMAEAYSEIGMKGERRRGKGHDGLYQGLSTATKDTYDALHMQALPPRSSGSGEGRGSLLTCGDVEENPGPHMTEYKPTVRLATRDDVPRAVRTLAAAFADYPATRHTVDPDRHIERVTELQELFLTRVGLDIGKVWVADDGAAVAVWTTPESVEAGAVFAEIGPRMAELSGSRLAAQQQMEGLLAPHRPKEPAWFLATVGVSPDHQGKGLGSAVVLPGVEAAERAGVPAFLETSAPRNLPFYERLGFTVTADVEVPEGPRTWCMTRKPGA

SEQ ID NO: 3440 - protein, 724 aa, Artificial Sequence
  Synthetic Polypeptide
MALPVTALLLPLALLLHAARPDIQMNQSPSSLSASLGDTITITCHASQNINVWLSWYQQKPGNIPKLLIYKASNLHTGVPSRFSGSGSGTGFTITISSLQPEDIATYYCQQGQSYPWTFGGGTKLEIKRGGGGSGGGGSGGGGSEVQLQQSGPELVKPGASVKISCKASGYSFTGYFMNWVKQSHGKSLEYIGRFNPYNGETLYNQKFKGKATLTVDKSSSTVHMELLSVTSEDSAVYYCGRSGNDDAMDYWGQGTSVTVSSATREQKLISEEDLAKPTTTPAPRPPTPAPTIASQPLSLRPEACRPAAGGAVHTRGLDFACDIYIWAPLAGTCGVLLLSLVITLYCKRGRKKLLYIFKQPFMRPVQTTQEEDGCSCRFPEEEEGGCELRVKFSRSADAPAYQQGQNQLYNELNLGRREEYDVLDKRRGRDPEMGGKPRRKNPQEGLYNELQKDKMAEAYSEIGMKGERRRGKGHDGLYQGLSTATKDTYDALHMQALPPRSSGSGEGRGSLLTCGDVEENPGPHMTEYKPTVRLATRDDVPRAVRTLAAAFADYPATRHTVDPDRHIERVTELQELFLTRVGLDIGKVWVADDGAAVAVWTTPESVEAGAVFAEIGPRMAELSGSRLAAQQQMEGLLAPHRPKEPAWFLATVGVSPDHQGKGLGSAVVLPGVEAAERAGVPAFLETSAPRNLPFYERLGFTVTADVEVPEGPRTWCMTRKPGA

SEQ ID NO: 3441 - protein, 725 aa, Artificial Sequence
  Synthetic Polypeptide
MALPVTALLLPLALLLHAARPDDIQMTQSPSILSASVGDRVTITCRASQRFGDYLAWYQQKPGQAPKLLIYGASTLQSGVPSRFSGSGSGTEFTLTISGLQPEDFATYYCQQANSFPITFGKGTRLDIRRGGGGSGGGGSGGGGSQVQLVQSGAEVKKPGSSVKVSCKASGGTFSSYAISWVRQAPGQGLEWMGWINVGNGNAIYSQKFQGRVTITRDTSATTAYMELSSLRSEDTAVYYCARDGERAWDLDYWGQGTLVTVSSTREQKLISEEDLAKPTTTPAPRPPTPAPTIASQPLSLRPEACRPAAGGAVHTRGLDFACDIYIWAPLAGTCGVLLLSLVITLYCKRGRKKLLYIFKQPFMRPVQTTQEEDGCSCRFPEEEEGGCELRVKFSRSADAPAYQQGQNQLYNELNLGRREEYDVLDKRRGRDPEMGGKPRRKNPQEGLYNELQKDKMAEAYSEIGMKGERRRGKGHDGLYQGLSTATKDTYDALHMQALPPRSSGSGEGRGSLLTCGDVEENPGPHMTEYKPTVRLATRDDVPRAVRTLAAAFADYPATRHTVDPDRHIERVTELQELFLTRVGLDIGKVWVADDGAAVAVWTTPESVEAGAVFAEIGPRMAELSGSRLAAQQQMEGLLAPHRPKEPAWFLATVGVSPDHQGKGLGSAVVLPGVEAAERAGVPAFLETSAPRNLPFYERLGFTVTADVEVPEGPRTWCMTRKPGA

SEQ ID NO: 3442 - protein, 730 aa, Artificial Sequence
  Synthetic Polypeptide
MALPVTALLLPLALLLHAARPDETTLTQSPGTLSLSPGERATLSCRASQSVSSSYLAWYQQKPGQAPRLLIYGASSRATGIPDRFSGSGSGTDFTLTISRLEPEDFAVYYCQQYGSSPYTFGQGTKLEIKRGGGGSGGGGSGGGGSQVQLVQSGGGVVQPGRSLRLSCAASGFTFSSYAMHWVRQAPGKGLEWVAVISYDGSNKYYADSVKGRFTISRDNSKNTLYLQMNSLRAEDTAVYYCARELRFLEWSSDAFDIWGQGTMVTVSSTREQKLISEEDLAKPTTTPAPRPPTPAPTIASQPLSLRPEACRPAAGGAVHTRGLDFACDIYIWAPLAGTCGVLLLSLVITLYCKRGRKKLLYIFKQPFMRPVQTTQEEDGCSCRFPEEEEGGCELRVKFSRSADAPAYQQGQNQLYNELNLGRREEYDVLDKRRGRDPEMGGKPRRKNPQEGLYNELQKDKMAEAYSEIGMKGERRRGKGHDGLYQGLSTATKDTYDALHMQALPPRSSGSGEGRGSLLTCGDVEENPGPHMTEYKPTVRLATRDDVPRAVRTLAAAFADYPATRHTVDPDRHIERVTELQELFLTRVGLDIGKVWVADDGAAVAVWTTPESVEAGAVFAEIGPRMAELSGSRLAAQQQMEGLLAPHRPKEPAWFLATVGVSPDHQGKGLGSAVVLPGVEAAERAGVPAFLETSAPRNLPFYERLGFTVTADVEVPEGPRTWCMTRKPGA

SEQ ID NO: 3443 - protein, 725 aa, Artificial Sequence
  Synthetic Polypeptide
MALPVTALLLPLALLLHAARPEIVLTQSPATLSLSPGERATLSCRASQSVRSYLAWYQQKPGQAPRLLIYDASNRATGIPARFSGSGSGTDFTLTISSLEPEDFAVYYCQQRSNWPPTFGQGTKVEIKGGGGSGGGGSGGGGSQLQVQESGPGLVKPSETLSLTCTVSGGSISNSYFSWGWIRQPPGKGLEWIGSFYYGEKTYYNPSLKSRATISIDTSKSQFSLKLSSVTAADTAVYYCPRGPTMIRGVIDSWGQGTLVTVSSTREQKLISEEDLAKPTTTPAPRPPTPAPTIASQPLSLRPEACRPAAGGAVHTRGLDFACDIYIWAPLAGTCGVLLLSLVITLYCKRGRKKLLYIFKQPFMRPVQTTQEEDGCSCRFPEEEEGGCELRVKFSRSADAPAYQQGQNQLYNELNLGRREEYDVLDKRRGRDPEMGGKPRRKNPQEGLYNELQKDKMAEAYSEIGMKGERRRGKGHDGLYQGLSTATKDTYDALHMQALPPRSSGSGEGRGSLLTCGDVEENPGPHMTEYKPTVRLATRDDVPRAVRTLAAAFADYPATRHTVDPDRHIERVTELQELFLTRVGLDIGKVWVADDGAAVAVWTTPESVEAGAVFAEIGPRMAELSGSRLAAQQQMEGLLAPHRPKEPAWFLATVGVSPDHQGKGLGSAVVLPGVEAAERAGVPAFLETSAPRNLPFYERLGFTVTADVEVPEGPRTWCMTRKPGA

SEQ ID NO: 3444 - protein, 722 aa, Artificial Sequence
  Synthetic Polypeptide
MALPVTALLLPLALLLHAARPDIQMTQSPSSLSASVGDRVTITCRASQGISSWLAWYQQKPEKAPKSLIYAASSLQSGVPSRFSGSGSGTDFTLTISSLQPEDFATYYCQQYNSYPYTFGQGTKLEIKGGGGSGGGGSGGGGSQVQLVQSGAEVRKPGSSVKVSCKASGGSFNNYPIFWVRQAPGQGFEWMGRIIPILGITAYAQKFQGRVTITADKSTSTAYMELNSLRSEDTAVYYCAGGDDLDAFDIWGQGTMVSVSSTREQKLISEEDLAKPTTTPAPRPPTPAPTIASQPLSLRPEACRPAAGGAVHTRGLDFACDIYIWAPLAGTCGVLLLSLVITLYCKRGRKKLLYIFKQPFMRPVQTTQEEDGCSCRFPEEEEGGCELRVKFSRSADAPAYQQGQNQLYNELNLGRREEYDVLDKRRGRDPEMGGKPRRKNPQEGLYNELQKDKMAEAYSEIGMKGERRRGKGHDGLYQGLSTATKDTYDALHMQALPPRSSGSGEGRGSLLTCGDVEENPGPHMTEYKPTVRLATRDDVPRAVRTLAAAFADYPATRHTVDPDRHIERVTELQELFLTRVGLDIGKVWVADDGAAVAVWTTPESVEAGAVFAEIGPRMAELSGSRLAAQQQMEGLLAPHRPKEPAWFLATVGVSPDHQGKGLGSAVVLPGVEAAERAGVPAFLETSAPRNLPFYERLGFTVTADVEVPEGPRTWCMTRKPGA

SEQ ID NO: 3445 - protein, 734 aa, Artificial Sequence
  Synthetic Polypeptide
MALPVTALLLPLALLLHAARPDIVMTQTPLSLPVTPGEPASISCRSSRSLLDSDDGNTYLDWYLQKPGQSPQLLIYTLSYRASGVPDRFSGSGSGTDFTLKISRVEAEDVGVYYCMQRVEFPITFGQGTRLEIKRGGGGSGGGGSGGGGSQVQLVESGGGVVQPGRSLRLSCAASGFIFSRYGMHWVRQAPGKGLKWVAVIWYDGSNKLYADSVKGRFTISRDNSKNTLYLQMNSLRAEDTAVYYCARDYYDNSRHHWGFDYWGQGTLVTVSSTREQKLISEEDLAKPTTTPAPRPPTPAPTIASQPLSLRPEACRPAAGGAVHTRGLDFACDIYIWAPLAGTCGVLLLSLVITLYCKRGRKKLLYIFKQPFMRPVQTTQEEDGCSCRFPEEEEGGCELRVKFSRSADAPAYQQGQNQLYNELNLGRREEYDVLDKRRGRDPEMGGKPRRKNPQEGLYNELQKDKMAEAYSEIGMKGERRRGKGHDGLYQGLSTATKDTYDALHMQALPPRSSGSGEGRGSLLTCGDVEENPGPHMTEYKPTVRLATRDDVPRAVRTLAAAFADYPATRHTVDPDRHIERVTELQELFLTRVGLDIGKVWVADDGAAVAVWTTPESVEAGAVFAEIGPRMAELSGSRLAAQQQMEGLLAPHRPKEPAWFLATVGVSPDHQGKGLGSAVVLPGVEAAERAGVPAFLETSAPRNLPFYERLGFTVTADVEVPEGPRTWCMTRKPGA

SEQ ID NO: 3446 - protein, 724 aa, Artificial Sequence
  Synthetic Polypeptide
MALPVTALLLPLALLLHAARPEIQMTQSPSSMSASLGDTITITCQATQDIFKNLNWYQQKPGKPPSLLIYYATELAEGVPSRFSGSGSGSDYSLTISNLESEDFAAYYCLQFFEFPFTFGSGTKLEMKGGGGSGGGGSGGGGSQVQLQQSGAELVRPGTSVKVSCKASGYVFTNYWIEWIKQRPGQGLEWIGVMNPGSGETTYNEKFKGKATLTADKSSSTAYMQLSSLTSVDSAVYFCARDHDRDYYAMDYWGQGTSVTVSSTREQKLISEEDLAKPTTTPAPRPPTPAPTIASQPLSLRPEACRPAAGGAVHTRGLDFACDIYIWAPLAGTCGVLLLSLVITLYCKRGRKKLLYIFKQPFMRPVQTTQEEDGCSCRFPEEEEGGCELRVKFSRSADAPAYQQGQNQLYNELNLGRREEYDVLDKRRGRDPEMGGKPRRKNPQEGLYNELQKDKMAEAYSEIGMKGERRRGKGHDGLYQGLSTATKDTYDALHMQALPPRSSGSGEGRGSLLTCGDVEENPGPHMTEYKPTVRLATRDDVPRAVRTLAAAFADYPATRHTVDPDRHIERVTELQELFLTRVGLDIGKVWVADDGAAVAVWTTPESVEAGAVFAEIGPRMAELSGSRLAAQQQMEGLLAPHRPKEPAWFLATVGVSPDHQGKGLGSAVVLPGVEAAERAGVPAFLETSAPRNLPFYERLGFTVTADVEVPEGPRTWCMTRKPGA

SEQ ID NO: 3447 - protein, 721 aa, Artificial Sequence
  Synthetic Polypeptide
MALPVTALLLPLALLLHAARPDILLTQSPAILSVSPGERVSFSCRASQNIGTSIHWYQQRTNGSPRLLIKYASESVSGIPSRFSGSGSGTDFTLSINSVESEDIADYYCQHTNSWPTTFGGGTKLEIKRGGGGSGGGGSGGGGSQVQLQQSDAELVKPGASVKISCKASGYTFTDHAIHWVKQKPEQGLEWIGYFSPGNGDIKYNEKFKGKATLTADKSSSTAYMQLNSLTSEDSAVYFCKRSYGNYDYWGQGTTLTVSSTREQKLISEEDLAKPTTTPAPRPPTPAPTIASQPLSLRPEACRPAAGGAVHTRGLDFACDIYIWAPLAGTCGVLLLSLVITLYCKRGRKKLLYIFKQPFMRPVQTTQEEDGCSCRFPEEEEGGCELRVKFSRSADAPAYQQGQNQLYNELNLGRREEYDVLDKRRGRDPEMGGKPRRKNPQEGLYNELQKDKMAEAYSEIGMKGERRRGKGHDGLYQGLSTATKDTYDALHMQALPPRSSGSGEGRGSLLTCGDVEENPGPHMTEYKPTVRLATRDDVPRAVRTLAAAFADYPATRHTVDPDRHIERVTELQELFLTRVGLDIGKVWVADDGAAVAVWTTPESVEAGAVFAEIGPRMAELSGSRLAAQQQMEGLLAPHRPKEPAWFLATVGVSPDHQGKGLGSAVVLPGVEAAERAGVPAFLETSAPRNLPFYERLGFTVTADVEVPEGPRTWCMTRKPGA

SEQ ID NO: 3448 - protein, 726 aa, Artificial Sequence
  Synthetic Polypeptide
MALPVTALLLPLALLLHAARPDIVMTQSPDSLAVSLGERATINCKSSQSLLNSGDQKNYLTWYQQKPGQPPKLLIYWASTRESGVPDRFSGSGSGTDFTLTISSLQAEDVAVYYCQNDYSYPLTFGQGTKVEIKGGGGSGGGGSGGGGSQVQLVQSGAEVKKTGSSVKVSCKASGYTFTDHAIHVWRQAPGQALEWMGHFSPGNTDIKYNDKFKGRVTLTVDRSMSTAYMELSSLRSEDTAMYYCKTSTFFFDYWGQGTMVTVSSTREQKLISEEDLAKPTTTPAPRPPTPAPTIASQPLSLRPEACRPAAGGAVHTRGLDFACDIYIWAPLAGTCGVLLLSLVITLYCKRGRKKLLYIFKQPFMRPVQTTQEEDGCSCRFPEEEEGGCELRVKFSRSADAPAYQQGQNQLYNELNLGRREEYDVLDKRRGRDPEMGGKPRRKNPQEGLYNELQKDKMAEAYSEIGMKGERRRGKGHDGLYQGLSTATKDTYDALHMQALPPRSSGSGEGRGSLLTCGDVEENPGPHMTEYKPTVRLATRDDVPRAVRTLAAAFADYPATRHTVDPDRHIERVTELQELFLTRVGLDIGKVWVADDGAAVAVWTTPESVEAGAVFAEIGPRMAELSGSRLAAQQQMEGLLAPHRPKEPAWFLATVGVSPDHQGKGLGSAVVLPGVEAAERAGVPAFLETSAPRNLPFYERLGFTVTADVEVPEGPRTWCMTRKPGA

SEQ ID NO: 3449 - protein, 648 aa, Artificial Sequence
  Synthetic Polypeptide
MELTELLLVVMLLLTARLTLSSPAPPACDLRVLSKLLRDSHVLHSRLSQCPEVHPLPTPVLLPAVDFSLGEWKTQMEETKAQDILGAVTLLLEGVMAARGQLGPTCLSSLLGQLSGQVRLLLGALQSLLGTQLPPQGRTTAHKDPNAIFLSFQHLLRGKVRFLMLVGGSTLCVRRAPPTTAVPSRTSTREQKLISEEDLAKPTTTPAPRPPTPAPTIASQPLSLRPEACRPAAGGAVHTRGLDFACDIYIWAPLAGTCGVLLLSLVITLYCKRGRKKLLYIFKQPFMRPVQTTQEEDGCSCRFPEEEEGGCELRVKFSRSADAPAYQQGQNQLYNELNLGRREEYDVLDKRRGRDPEMGGKPRRKNPQEGLYNELQKDKMAEAYSEIGMKGERRRGKGHDGLYQGLSTATKDTYDALHMQALPPRSSGSGEGRGSLLTCGDVEENPGPHMTEYKPTVRLATRDDVPRAVRTLAAAFADYPATRHTVDPDRHIERVTELQELFLTRVGLDIGKVWVADDGAAVAVWTTPESVEAGAVFAEIGPRMAELSGSRLAAQQQMEGLLAPHRPKEPAWFLATVGVSPDHQGKGLGSAVVLPGVEAAERAGVPAFLETSAPRNLPFYERLGFTVTADVEVPEGPRTWCMTRKPGA

SEQ ID NO: 3450 - protein, 725 aa, Artificial Sequence
  Synthetic Polypeptide
MALPVTALLLPLALLLHAARPDIQMTQSPSSLSASVGDRVTITCKASQDVSIAVAWYQQKPGKAPKVLIYSASYRYTGVPDRFSGSGSGTDFTFTISSLQPEDIAVYYCQQHYITPLTFGGGTKVEIKGGGGSGGGGSGGGGSQIQLVQSGHEVKKPGASVKVSCKASGYTFTNYGMNWVRQAPGQGLEWMGWINTKTGEPTYAEEFKGRFVFSLETSASTAYLQISSLKAEDTAMYFCGRGGYGSSYWYFDVWGQGTTVTVSSTREQKLISEEDLAKPTTTPAPRPPTPAPTIASQPLSLRPEACRPAAGGAVHTRGLDFACDIYIWAPLAGTCGVLLLSLVITLYCKRGRKKLLYIFKQPFMRPVQTTQEEDGCSCRFPEEEEGGCELRVKFSRSADAPAYQQGQNQLYNELNLGRREEYDVLDKRRGRDPEMGGKPRRKNPQEGLYNELQKDKMAEAYSEIGMKGERRRGKGHDGLYQGLSTATKDTYDALHMQALPPRSSGSGEGRGSLLTCGDVEENPGPHMTEYKPTVRLATRDDVPRAVRTLAAAFADYPATRHTVDPDRHIERVTELQELFLTRVGLDIGKVWVADDGAAVAVWTTPESVEAGAVFAEIGPRMAELSGSRLAAQQQMEGLLAPHRPKEPAWFLATVGVSPDHQGKGLGSAVVLPGVEAAERAGVPAFLETSAPRNLPFYERLGFTVTADVEVPEGPRTWCMTRKPGA

SEQ ID NO: 3451 - protein, 727 aa, Artificial Sequence
  Synthetic Polypeptide
MALPVTALLLPLALLLHAARPDIVMTQSPDSLAVSLGERATINCRASKSVSTSGYSYMHWYQQKPGQPPKLLIYLASNLESGVPDRFSGSGSGTDFTLTISSLQAEDVAVYYCQHSRELPYTFGQGTKLEIKGGGGSGGGGSGGGGSQVQLQESGPGLVKPSETLSLTCTVSGGSISSYGVHWIRQPPGKGLEWIGVIWTSGVTDYNSALMGRVTISVDTSKNQFSLKLSSVTAADTAVYYCARDGDYDRYTMDYWGQGTLVTVSSTREQKLISEEDLAKPTTTPAPRPPTPAPTIASQPLSLRPEACRPAAGGAVHTRGLDFACDIYIWAPLAGTCGVLLLSLVITLYCKRGRKKLLYIFKQPFMRPVQTTQEEDGCSCRFPEEEEGGCELRVKFSRSADAPAYQQGQNQLYNELNLGRREEYDVLDKRRGRDPEMGGKPRRKNPQEGLYNELQKDKMAEAYSEIGMKGERRRGKGHDGLYQGLSTATKDTYDALHMQALPPRSSGSGEGRGSLLTCGDVEENPGPHMTEYKPTVRLATRDDVPRAVRTLAAAFADYPATRHTVDPDRHIERVTELQELFLTRVGLDIGKVWVADDGAAVAVWTTPESVEAGAVFAEIGPRMAELSGSRLAAQQQMEGLLAPHRPKEPAWFLATVGVSPDHQGKGLGSAVVLPGVEAAERAGVPAFLETSAPRNLPFYERLGFTVTADVEVPEGPRTWCMTRKPGA

SEQ ID NO: 3452 - protein, 706 aa, Artificial Sequence
  Synthetic Polypeptide
MTALFLMSMLFGLACGQAMSFCIPTEYTMHIERRECAYCLTINTTICAGYCMTRDINGKLFLPKYALSQDVCTYRDFIYRTVEIPGCPLHVAPYFSYPVALSCKCGKCNTDYSDCIHEAIKTNYCTKPQKSYLVGFSVGGGGSGGGGSGGGGSAPDVQDCPECTLQENPFFSQPGAPILQCMGCCFSRAYPTPLRSKKTMLVQKNVTSESTCCVAKSYNRVTVMGGFKVENHTACHCSTCYYHKSTREQKLISEEDLAKPTTTPAPRPPTPAPTIASQPLSLRPEACRPAAGGAVHTRGLDFACDIYIWAPLAGTCGVLLLSLVITLYCKRGRKKLLYIFKQPFMRPVQTTQEEDGCSCRFPEEEEGGCELRVKFSRSADAPAYQQGQNQLYNELNLGRREEYDVLDKRRGRDPEMGGKPRRKNPQEGLYNELQKDKMAEAYSEIGMKGERRRGKGHDGLYQGLSTATKDTYDALHMQALPPRSSGSGEGRGSLLTCGDVEENPGPHMTEYKPTVRLATRDDVPRAVRTLAAAFADYPATRHTVDPDRHIERVTELQELFLTRVGLDIGKVWVADDGAAVAVWTTPESVEAGAVFAEIGPRMAELSGSRLAAQQQMEGLLAPHRPKEPAWFLATVGVSPDHQGKGLGSAVVLPGVEAAERAGVPAFLETSAPRNLPFYERLGFTVTADVEVPEGPRTWCMTRKPGA

SEQ ID NO: 3453 - protein, 723 aa, Artificial Sequence
  Synthetic Polypeptide
MALPVTALLLPLALLLHAARPQSVLTQPPSVSVSPGQTASITCSGDKLGDKYACWYQQKPGQSPVLVIYQDSKRPSGIPERFSGSNSGNTATLTISGTQAMDEADYYCQAWDSSTAVVFGGGTKLTVLGGGGSGGGGSGGGGSQVQLVQSGAEVKKPGQSLKISCKASGYSLTDNWIGWVRQKPGKGLEWMGIIYPGDSDTRYSPSFQGQVTISADKSINTAYLQWSSLKASDTAIYYCVGLDWNYNPLRYWGPGTLVTVSSTREQKLISEEDLAKPTTTPAPRPPTPAPTIASQPLSLRPEACRPAAGGAVHTRGLDFACDIYIWAPLAGTCGVLLLSLVITLYCKRGRKKLLYIFKQPFMRPVQTTQEEDGCSCRFPEEEEGGCELRVKFSRSADAPAYQQGQNQLYNELNLGRREEYDVLDKRRGRDPEMGGKPRRKNPQEGLYNELQKDKMAEAYSEIGMKGERRRGKGHDGLYQGLSTATKDTYDALHMQALPPRSSGSGEGRGSLLTCGDVEENPGPHMTEYKPTVRLATRDDVPRAVRTLAAAFADYPATRHTVDPDRHIERVTELQELFLTRVGLDIGKVWVADDGAAVAVWTTPESVEAGAVFAEIGPRMAELSGSRLAAQQQMEGLLAPHRPKEPAWFLATVGVSPDHQGKGLGSAVVLPGVEAAERAGVPAFLETSAPRNLPFYERLGFTVTADVEVPEGPRTWCMTRKPGA

SEQ ID NO: 3454 - protein, 721 aa, Artificial Sequence
  Synthetic Polypeptide
MALPVTALLLPLALLLHAARPDIVMTQSQKFMSTSVGDRVSIICKASQNVGTFVAWYQQKPGQSPKLLVYSASNRYTGVPDRFTGSGSGTDFTLTINNMQSEDLADYFCRQYSSYPYTFGGGTKLEIKGGGGSGGGGSGGGGSEVQLQQSGPELVKPGASMKISCKASGYSFSAYTMNWVKQSHGKNLEWIGLINPYNGGTNYNQEFEGKATLTVNKSSNTAFMELLSLTSDDSAVYYCARRDWDYFDYWGQGTTLTVSSTREQKLISEEDLAKPTTTPAPRPPTPAPTIASQPLSLRPEACRPAAGGAVHTRGLDFACDIYIWAPLAGTCGVLLLSLVITLYCKRGRKKLLYIFKQPFMRPVQTTQEEDGCSCRFPEEEEGGCELRVKFSRSADAPAYQQGQNQLYNELNLGRREEYDVLDKRRGRDPEMGGKPRRKNPQEGLYNELQKDKMAEAYSEIGMKGERRRGKGHDGLYQGLSTATKDTYDALHMQALPPRSSGSGEGRGSLLTCGDVEENPGPHMTEYKPTVRLATRDDVPRAVRTLAAAFADYPATRHTVDPDRHIERVTELQELFLTRVGLDIGKVWVADDGAAVAVWTTPESVEAGAVFAEIGPRMAELSGSRLAAQQQMEGLLAPHRPKEPAWFLATVGVSPDHQGKGLGSAVVLPGVEAAERAGVPAFLETSAPRNLPFYERLGFTVTADVEVPEGPRTWCMTRKPGA

SEQ ID NO: 3455 - protein, 732 aa, Artificial Sequence
  Synthetic Polypeptide
MALPVTALLLPLALLLHAARPAIQMTQSPSSLSASVGDRVTITCRASQSISNYLNWYQQKPGKAPKLLIYAASSLQSGVPSRFSGSGSGTDFTLTISSLQPEDFATYYCQQSYSSPSTTFGQGTKLEIKRGGGGSGGGGSGGGGSEVQLVESGGGLIQPGGSLRLSCAASGFTVSSNYMSWVRQAPGKGLEWVSVTYSGGSTSYADSVKGRFTISRDNSKNTLYLQMNSLRAEDTAVYYCARGGRYCSSISCYARSGCDYWGQGTLVTVSSTREQKLISEEDLAKPTTTPAPRPPTPAPTIASQPLSLRPEACRPAAGGAVHTRGLDFACDIYIWAPLAGTCGVLLLSLVITLYCKRGRKKLLYIFKQPFMRPVQTTQEEDGCSCRFPEEEEGGCELRVKFSRSADAPAYQQGQNQLYNELNLGRREEYDVLDKRRGRDPEMGGKPRRKNPQEGLYNELQKDKMAEAYSEIGMKGERRRGKGHDGLYQGLSTATKDTYDALHMQALPPRSSGSGEGRGSLLTCGDVEENPGPHMTEYKPTVRLATRDDVPRAVRTLAAAFADYPATRHTVDPDRHIERVTELQELFLTRVGLDIGKVWVADDGAAVAVWTTPESVEAGAVFAEIGPRMAELSGSRLAAQQQMEGLLAPHRPKEPAWFLATVGVSPDHQGKGLGSAVVLPGVEAAERAGVPAFLETSAPRNLPFYERLGFTVTADVEVPEGPRTWCMTRKPGA

SEQ ID NO: 3456 - protein, 727 aa, Artificial Sequence
  Synthetic Polypeptide
MALPVTALLLPLALLLHAARPDIQMTQSPSSLSASVGDRVTITCRASQSIGTSLHWYQQKPGKAPKLLIKFASRLQSGVPSRFSGSGSGTDFTLTISSLQPEDFATYYCQQSPGFPPTFGQGTKLEIKRGGGGSGGGGSGGGGSQVQLVESGGGLVKPGGSLRLSCAASGFSITTSGYYWTWIRQFPGKGLEWMGYIGYNSKTYYNPALKSRITISRDNAKNSLYLQMNSLRAEDTAVYYCARSLYGGYKDAFDSWGQGTLVTVSSTREQKLISEEDLAKPTTTPAPRPPTPAPTIASQPLSLRPEACRPAAGGAVHTRGLDFACDIYIWAPLAGTCGVLLLSLVITLYCKRGRKKLLYIFKQPFMRPVQTTQEEDGCSCRFPEEEEGGCELRVKFSRSADAPAYQQGQNQLYNELNLGRREEYDVLDKRRGRDPEMGGKPRRKNPQEGLYNELQKDKMAEAYSEIGMKGERRRGKGHDGLYQGLSTATKDTYDALHMQALPPRSSGSGEGRGSLLTCGDVEENPGPHMTEYKPTVRLATRDDVPRAVRTLAAAFADYPATRHTVDPDRHIERVTELQELFLTRVGLDIGKVWVADDGAAVAVWTTPESVEAGAVFAEIGPRMAELSGSRLAAQQQMEGLLAPHRPKEPAWFLATVGVSPDHQGKGLGSAVVLPGVEAAERAGVPAFLETSAPRNLPFYERLGFTVTADVEVPEGPRTWCMTRKPGA

SEQ ID NO: 3457 - protein, 732 aa, Artificial Sequence
  Synthetic Polypeptide
MALPVTALLLPLALLLHAARPDEIVLTQSPLSLPVTPGEPASISCRSSQSLLHSIGYNYLDWYLQKPGQSPQLLIYLGSNRASGVPDRFSGSGSGTDFTLKISRVEAEDVGVYYCMQALQTPLTFGGGTKVEIKRGGGGSGGGGSGGGGSEVQLVESGGGVVQPGRSLRLSCAASGFTFRSYGMHWVRQAPGKGLEWVAVISYDGSNKYYTDSVNGRFTISRDNSKNTLYLQMNSLRAEDTAVYYCARGGGYYETSGPDYWGQGTLVTVSSTREQKLISEEDLAKPTTTPAPRPPTPAPTIASQPLSLRPEACRPAAGGAVHTRGLDFACDIYIWAPLAGTCGVLLLSLVITLYCKRGRKKLLYIFKQPFMRPVQTTQEEDGCSCRFPEEEEGGCELRVKFSRSADAPAYQQGQNQLYNELNLGRREEYDVLDKRRGRDPEMGGKPRRKNPQEGLYNELQKDKMAEAYSEIGMKGERRRGKGHDGLYQGLSTATKDTYDALHMQALPPRSSGSGEGRGSLLTCGDVEENPGPHMTEYKPTVRLATRDDVPRAVRTLAAAFADYPATRHTVDPDRHIERVTELQELFLTRVGLDIGKVWVADDGAAVAVWTTPESVEAGAVFAEIGPRMAELSGSRLAAQQQMEGLLAPHRPKEPAWFLATVGVSPDHQGKGLGSAVVLPGVEAAERAGVPAFLETSAPRNLPFYERLGFTVTADVEVPEGPRTWCMTRKPGA

SEQ ID NO: 3458 - protein, 730 aa, Artificial Sequence
  Synthetic Polypeptide
MALPVTALLLPLALLLHAARPDDVVMTQSPLSLPVTPGEPASISCRSSQSLLHSIGYNYLHWFLQKPGQSPQLLIYLGSNRASGVPDRFSGSGSGTDFTLKISRVEAEDVGVYYCMQALQTPPTFGQGTRLEIKRGGGGSGGGGSGGGGSQLQLQESGPGLVKPSGTLSLTCAVSGGSISSSNWWSWVRQPPGKGLEWIGEIYHSGSTNYNPSLKSRVTISVDKSKNQFSLKLSSVTAADTAVYYCVGSPYGDYVLDYWGQGTLVTVSSTREQKLISEEDLAKPTTTPAPRPPTPAPTIASQPLSLRPEACRPAAGGAVHTRGLDFACDIYIWAPLAGTCGVLLLSLVITLYCKRGRKKLLYIFKQPFMRPVQTTQEEDGCSCRFPEEEEGGCELRVKFSRSADAPAYQQGQNQLYNELNLGRREEYDVLDKRRGRDPEMGGKPRRKNPQEGLYNELQKDKMAEAYSEIGMKGERRRGKGHDGLYQGLSTATKDTYDALHMQALPPRSSGSGEGRGSLLTCGDVEENPGPHMTEYKPTVRLATRDDVPRAVRTLAAAFADYPATRHTVDPDRHIERVTELQELFLTRVGLDIGKVWVADDGAAVAVWTTPESVEAGAVFAEIGPRMAELSGSRLAAQQQMEGLLAPHRPKEPAWFLATVGVSPDHQGKGLGSAVVLPGVEAAERAGVPAFLETSAPRNLPFYERLGFTVTADVEVPEGPRTWCMTRKPGA

SEQ ID NO: 3459 - protein, 733 aa, Artificial Sequence
  Synthetic Polypeptide
MALPVTALLLPLALLLHAARPDVVMTQSPLSLPVTPGEPASISCRSSQSLLHSNGHNYLDWYLQKPGQSPQLLIYLGSNRASGVPDRFSGSGSGTDFTLKISRVEAEDVGVYYCMQTLQTPLTFGPGTKVDIKRGGGGSGGGGSGGGGSEVQLVETGGGVVQPGRSLRLSCAASGFTFSSYGMHWVRQAPGKGLEWVAVISYDGSNKYYADSVKGRFTISRDNSKNTLYLQMNSLRAEDTAVYYCAKDRYGWGSSFGHFDYWGQGTLVTVSSTREQKLISEEDLAKPTTTPAPRPPTPAPTIASQPLSLRPEACRPAAGGAVHTRGLDFACDIYIWAPLAGTCGVLLLSLVITLYCKRGRKKLLYIFKQPFMRPVQTTQEEDGCSCRFPEEEEGGCELRVKFSRSADAPAYQQGQNQLYNELNLGRREEYDVLDKRRGRDPEMGGKPRRKNPQEGLYNELQKDKMAEAYSEIGMKGERRRGKGHDGLYQGLSTATKDTYDALHMQALPPRSSGSGEGRGSLLTCGDVEENPGPHMTEYKPTVRLATRDDVPRAVRTLAAAFADYPATRHTVDPDRHIERVTELQELFLTRVGLDIGKVWVADDGAAVAVWTTPESVEAGAVFAEIGPRMAELSGSRLAAQQQMEGLLAPHRPKEPAWFLATVGVSPDHQGKGLGSAVVLPGVEAAERAGVPAFLETSAPRNLPFYERLGFTVTADVEVPEGPRTWCMTRKPGA

SEQ ID NO: 3460 - protein, 728 aa, Artificial Sequence
  Synthetic Polypeptide
MALPVTALLLPLALLLHAARPDEIVLTQSPGTLSLSLGERATLSCRASQSISSSFLAWYQQKPGQAPKLLIYAASTRATGIPDRFSGSGSGTDFTLTISRLEPEDFAVYYCQQYGRSLSFGGGTKVEVKGGGGSGGGGSGGGGSQVQLQQSGPGLVKPSQTLSLTCAISGDSVSGNSATWNWIRQSPSRGLEWLGRTYYRSKWNHDYAESVKSRITINPDTSKNQFSLQLNSVTPEDTAVYYCARGDSSSWYAFDYWGQGTLVTVSSTREQKLISEEDLAKPTTTPAPRPPTPAPTIASQPLSLRPEACRPAAGGAVHTRGLDFACDIYIWAPLAGTCGVLLLSLVITLYCKRGRKKLLYIFKQPFMRPVQTTQEEDGCSCRFPEEEEGGCELRVKFSRSADAPAYQQGQNQLYNELNLGRREEYDVLDKRRGRDPEMGGKPRRKNPQEGLYNELQKDKMAEAYSEIGMKGERRRGKGHDGLYQGLSTATKDTYDALHMQALPPRSSGSGEGRGSLLTCGDVEENPGPHMTEYKPTVRLATRDDVPRAVRTLAAAFADYPATRHTVDPDRHIERVTELQELFLTRVGLDIGKVWVADDGAAVAVWTTPESVEAGAVFAEIGPRMAELSGSRLAAQQQMEGLLAPHRPKEPAWFLATVGVSPDHQGKGLGSAVVLPGVEAAERAGVPAFLETSAPRNLPFYERLGFTVTADVEVPEGPRTWCMTRKPGA

SEQ ID NO: 3461 - protein, 728 aa, Artificial Sequence
  Synthetic Polypeptide
MALPVTALLLPLALLLHAARPDQTVVTQPPSASGTPGQRVTISCSGSSSNIGSNYVYWYQQLPGTAPKLLIYRSNQRPSGVPDRFSGSKSGTSASLAISGPRSVDEADYYCAAWDDSLNGVVFGGGTKLTVLGGGGGSGGGGSGGGGSQVQLVQSGAEVKKPGSSVKVSCKASGGTFSSYAISWVRQAPGQGLEWMGGIIPIFGTANYAQKFQGRVTITADESTSTAYMELSSLRSEDTAVYYCARRIPPYYGMDVWGQGTTVTVSSTREQKLISEEDLAKPTTTPAPRPPTPAPTIASQPLSLRPEACRPAAGGAVHTRGLDFACDIYIWAPLAGTCGVLLLSLVITLYCKRGRKKLLYIFKQPFMRPVQTTQEEDGCSCRFPEEEEGGCELRVKFSRSADAPAYQQGQNQLYNELNLGRREEYDVLDKRRGRDPEMGGKPRRKNPQEGLYNELQKDKMAEAYSEIGMKGERRRGKGHDGLYQGLSTATKDTYDALHMQALPPRSSGSGEGRGSLLTCGDVEENPGPHMTEYKPTVRLATRDDVPRAVRTLAAAFADYPATRHTVDPDRHIERVTELQELFLTRVGLDIGKVWVADDGAAVAVWTTPESVEAGAVFAEIGPRMAELSGSRLAAQQQMEGLLAPHRPKEPAWFLATVGVSPDHQGKGLGSAVVLPGVEAAERAGVPAFLETSAPRNLPFYERLGFTVTADVEVPEGPRTWCMTRKPGA

SEQ ID NO: 3462 - protein, 728 aa, Artificial Sequence
  Synthetic Polypeptide
MALPVTALLLPLALLLHAARPDQSVVTQPPSVSVAPGKTARITCGRNNIGSKSVHWYQQKPGQAPVLVVYDDSDRPSGIPERFSGSNSGNTATLTISRVEAGDEADYYCQVWDSSSDHVVFGGGTKLTVLGGGGGSGGGGSGGGGSEVQLVQSGGGVVRPGGSLRLSCAASGFTFDDYGMSWVRQAPGKGLEWVSGINWNGGSTGYADSVRGRFTISRDNAKNSLYLQMNSLRAEDTALYYCARERGYGYHDPHDYWGQGTLVTVSSTREQKLISEEDLAKPTTTPAPRPPTPAPTIASQPLSLRPEACRPAAGGAVHTRGLDFACDIYIWAPLAGTCGVLLLSLVITLYCKRGRKKLLYIFKQPFMRPVQTTQEEDGCSCRFPEEEEGGCELRVKFSRSADAPAYQQGQNQLYNELNLGRREEYDVLDKRRGRDPEMGGKPRRKNPQEGLYNELQKDKMAEAYSEIGMKGERRRGKGHDGLYQGLSTATKDTYDALHMQALPPRSSGSGEGRGSLLTCGDVEENPGPHMTEYKPTVRLATRDDVPRAVRTLAAAFADYPATRHTVDPDRHIERVTELQELFLTRVGLDIGKVWVADDGAAVAVWTTPESVEAGAVFAEIGPRMAELSGSRLAAQQQMEGLLAPHRPKEPAWFLATVGVSPDHQGKGLGSAVVLPGVEAAERAGVPAFLETSAPRNLPFYERLGFTVTADVEVPEGPRTWCMTRKPGA

SEQ ID NO: 3463 - protein, 740 aa, Artificial Sequence
  Synthetic Polypeptide
MALPVTALLLPLALLLHAARPEQKLISEEDLEFQAVVTQPPSASGTPGQRVTISCSGSSSNIGSNTVNWYQQVPGTAPKLLIYSNNQRPSGVPDRFSGSKSGTSASLAISGLQSEDEADYYCAAWDDSLNGWVFGGGTKLTVLGGGGSGGGGSGGGGSQMQLVQSGAEVKEPGESLRISCKGSGYSFTNFWISWVRQMPGKGLEWMGRVDPGYSYSTYSPSFQGHVTISADKSTSTAYLQWNSLKASDTAMYYCARVQYSGYYDWFDPWGQGTLVTVSSTREQKLISEEDLAKPTTTPAPRPPTPAPTIASQPLSLRPEACRPAAGGAVHTRGLDFACDIYIWAPLAGTCGVLLLSLVITLYCKRGRKKLLYIFKQPFMRPVQTTQEEDGCSCRFPEEEEGGCELRVKFSRSADAPAYQQGQNQLYNELNLGRREEYDVLDKRRGRDPEMGGKPRRKNPQEGLYNELQKDKMAEAYSEIGMKGERRRGKGHDGLYQGLSTATKDTYDALHMQALPPRSSGSGEGRGSLLTCGDVEENPGPHMTEYKPTVRLATRDDVPRAVRTLAAAFADYPATRHTVDPDRHIERVTELQELFLTRVGLDIGKVWVADDGAAVAVWTTPESVEAGAVFAEIGPRMAELSGSRLAAQQQMEGLLAPHRPKEPAWFLATVGVSPDHQGKGLGSAVVLPGVEAAERAGVPAFLETSAPRNLPFYERLGFTVTADVEVPEGPRTWCMTRKPGA

SEQ ID NO: 3464 - protein, 734 aa, Artificial Sequence
  Synthetic Polypeptide
MALPVTALLLPLALLLHAARPEQKLISEEDLEFDIQMTQSPSTLSASVGDRVTITCRASQNINKWLAWYQQRPGKAPQLLIYKASSLESGVPSRFSGSGSGTEYTLTISSLQPDDFATYYCQQYNSYATFGQGTKVEIKRGGGGSGGGGSGGGGSQVQLVQSGAEVKKPGESLKISCKGSGYNFSNKWIGWVRQLPGRGLEWIAIIYPGYSDITYSPSFQGRVTISADTSINTAYLHWHSLKASDTAMYYCVRHTALAGFDYWGLGTLVTVSSTREQKLISEEDLAKPTTTPAPRPPTPAPTIASQPLSLRPEACRPAAGGAVHTRGLDFACDIYIWAPLAGTCGVLLLSLVITLYCKRGRKKLLYIFKQPFMRPVQTTQEEDGCSCRFPEEEEGGCELRVKFSRSADAPAYQQGQNQLYNELNLGRREEYDVLDKRRGRDPEMGGKPRRKNPQEGLYNELQKDKMAEAYSEIGMKGERRRGKGHDGLYQGLSTATKDTYDALHMQALPPRSSGSGEGRGSLLTCGDVEENPGPHMTEYKPTVRLATRDDVPRAVRTLAAAFADYPATRHTVDPDRHIERVTELQELFLTRVGLDIGKVWVADDGAAVAVWTTPESVEAGAVFAEIGPRMAELSGSRLAAQQQMEGLLAPHRPKEPAWFLATVGVSPDHQGKGLGSAVVLPGVEAAERAGVPAFLETSAPRNLPFYERLGFTVTADVEVPEGPRTWCMTRKPGA

SEQ ID NO: 3465 - protein, 724 aa, Artificial Sequence
  Synthetic Polypeptide
MALPVTALLLPLALLLHAARPEIVLTQSPGTLSLSPGERATLSCRASQSVSNTYLAWYHQRPGQAPRLLIYGASSRATGIPDRFSGSGSGTDFALTISSLEPEDFAVYYCQQYSNSWTFGQGTKVEIKRGGGGSGGGGSGGGGSQVQLVESGGGVVQPGRSLRLSCAASGFTFSSYDMHWVRQAPGKGLEWVAVISYDGTNEYYADSVKGRFTISRDTSKNTLYLQMNSLRAEDTAVYYCARERYFDWSFDYWGQGTLVSVSSTREQKLISEEDLAKPTTTPAPRPPTPAPTIASQPLSLRPEACRPAAGGAVHTRGLDFACDIYIWAPLAGTCGVLLLSLVITLYCKRGRKKLLYIFKQPFMRPVQTTQEEDGCSCRFPEEEEGGCELRVKFSRSADAPAYQQGQNQLYNELNLGRREEYDVLDKRRGRDPEMGGKPRRKNPQEGLYNELQKDKMAEAYSEIGMKGERRRGKGHDGLYQGLSTATKDTYDALHMQALPPRSSGSGEGRGSLLTCGDVEENPGPHMTEYKPTVRLATRDDVPRAVRTLAAAFADYPATRHTVDPDRHIERVTELQELFLTRVGLDIGKVWVADDGAAVAVWTTPESVEAGAVFAEIGPRMAELSGSRLAAQQQMEGLLAPHRPKEPAWFLATVGVSPDHQGKGLGSAVVLPGVEAAERAGVPAFLETSAPRNLPFYERLGFTVTADVEVPEGPRTWCMTRKPGA

SEQ ID NO: 3466 - protein, 723 aa, Artificial Sequence
  Synthetic Polypeptide
MALPVTALLLPLALLLHAARPELTQDPAVSVALGQTVRITCQGDSLRSNYANWYQQKPGQAPVLVIYGQNNRPSGIPDRFSGSSSGNTASLTITGAQAADEADYYCDSRVSTGNHVVFGGGTKLTVLGQGGGGSGGGGSGGGGSEVQLVQSGAEVKKPGASVKVSCKASGYTFTSYAMHWVRQAPGQRLEWMGWINAGNGNTKYSQKFQGRVTITRDTSASTAYMELSSLRSEDTAVYYCARDISYGSFDYWGQGTLVTVSSTREQKLISEEDLAKPTTTPAPRPPTPAPTIASQPLSLRPEACRPAAGGAVHTRGLDFACDIYIWAPLAGTCGVLLLSLVITLYCKRGRKKLLYIFKQPFMRPVQTTQEEDGCSCRFPEEEEGGCELRVKFSRSADAPAYQQGQNQLYNELNLGRREEYDVLDKRRGRDPEMGGKPRRKNPQEGLYNELQKDKMAEAYSEIGMKGERRRGKGHDGLYQGLSTATKDTYDALHMQALPPRSSGSGEGRGSLLTCGDVEENPGPHMTEYKPTVRLATRDDVPRAVRTLAAAFADYPATRHTVDPDRHIERVTELQELFLTRVGLDIGKVWVADDGAAVAVWTTPESVEAGAVFAEIGPRMAELSGSRLAAQQQMEGLLAPHRPKEPAWFLATVGVSPDHQGKGLGSAVVLPGVEAAERAGVPAFLETSAPRNLPFYERLGFTVTADVEVPEGPRTWCMTRKPGA

SEQ ID NO: 3467 - protein, 725 aa, Artificial Sequence
  Synthetic Polypeptide
MALPVTALLLPLALLLHAARPDIVLTQTPATLSVTPGDSVSLSCRASQSISNNLHWYQQKSHESPRLLIKNASQSISGIPSKFSGSGSGTDFTLRINSVETEDFGMYFCQQSNSWPYTFGSGTKLEIKGGGGSGGGGSGGGGSQVKLQQSGPELVKPGASVKISCKASGYSFTGYYMHWVKQSHGNILDWIGYIYPYNGVSSYNQKFKGKATLTVDKSSSTAYMELRSLTSEDSAVYYCARERGLYQLRAMDYWGQGTSVTVSSTREQKLISEEDLAKPTTTPAPRPPTPAPTIASQPLSLRPEACRPAAGGAVHTRGLDFACDIYIWAPLAGTCGVLLLSLVITLYCKRGRKKLLYIFKQPFMRPVQTTQEEDGCSCRFPEEEEGGCELRVKFSRSADAPAYQQGQNQLYNELNLGRREEYDVLDKRRGRDPEMGGKPRRKNPQEGLYNELQKDKMAEAYSEIGMKGERRRGKGHDGLYQGLSTATKDTYDALHMQALPPRSSGSGEGRGSLLTCGDVEENPGPHMTEYKPTVRLATRDDVPRAVRTLAAAFADYPATRHTVDPDRHIERVTELQELFLTRVGLDIGKVWVADDGAAVAVWTTPESVEAGAVFAEIGPRMAELSGSRLAAQQQMEGLLAPHRPKEPAWFLATVGVSPDHQGKGLGSAVVLPGVEAAERAGVPAFLETSAPRNLPFYERLGFTVTADVEVPEGPRTWCMTRKPGA

SEQ ID NO: 3468 - protein, 716 aa, Artificial Sequence
  Synthetic Polypeptide
MALPVTALLLPLALLLHAARPDIVMTQTPAIMSASPGQKVTITCSASSSVNYMHWYQQKLGSSPKLWIYDTSKLAPGVPARFSGSGSGTSYSLTISSMEAEDAASYFCHQWSSYPYTFGSGTKLEIKGGGGSGGGGSGGGGSEVQLQESGPDLVKPSQSLSLTCTVTGYSITSGYGWHWIRQFPGNKLEWMGYIHYSGSTTYNPSLKSRISISRDTSKNQFFLQLNSVTTEDTATYYCARSLRYWGQGTTLTVSSTREQKLISEEDLAKPTTTPAPRPPTPAPTIASQPLSLRPEACRPAAGGAVHTRGLDFACDIYIWAPLAGTCGVLLLSLVITLYCKRGRKKLLYIFKQPFMRPVQTTQEEDGCSCRFPEEEEGGCELRVKFSRSADAPAYQQGQNQLYNELNLGRREEYDVLDKRRGRDPEMGGKPRRKNPQEGLYNELQKDKMAEAYSEIGMKGERRRGKGHDGLYQGLSTATKDTYDALHMQALPPRSSGSGEGRGSLLTCGDVEENPGPHMTEYKPTVRLATRDDVPRAVRTLAAAFADYPATRHTVDPDRHIERVTELQELFLTRVGLDIGKVWVADDGAAVAVWTTPESVEAGAVFAEIGPRMAELSGSRLAAQQQMEGLLAPHRPKEPAWFLATVGVSPDHQGKGLGSAVVLPGVEAAERAGVPAFLETSAPRNLPFYERLGFTVTADVEVPEGPRTWCMTRKPGA

SEQ ID NO: 3469 - protein, 719 aa, Artificial Sequence
  Synthetic Polypeptide
MALPVTALLLPLALLLHAARPDIQMTQSPSSLSASVGDRVTITCSATSSISYMHWYQQKPGKAPKGWIYDTSKLAHGVPSRFSGSGSGTDFTLTISSLQPEDFATYYCHQRRSYPFTFGQGTKVEIKGGGGSGGGGSGGGGSEVQLVQSGAEVKKPGASVKVSCKASGYTFTNFWIHWVRQAPGQGLEWIGEIDPSDSYTNYNQKFKGRVTITRDTSTSTAYLELSSLRSEDTAVYYCAREITTVDYWGQGTLVTVSSTREQKLISEEDLAKPTTTPAPRPPTPAPTIASQPLSLRPEACRPAAGGAVHTRGLDFACDIYIWAPLAGTCGVLLLSLVITLYCKRGRKKLLYIFKQPFMRPVQTTQEEDGCSCRFPEEEEGGCELRVKFSRSADAPAYQQGQNQLYNELNLGRREEYDVLDKRRGRDPEMGGKPRRKNPQEGLYNELQKDKMAEAYSEIGMKGERRRGKGHDGLYQGLSTATKDTYDALHMQALPPRSSGSGEGRGSLLTCGDVEENPGPHMTEYKPTVRLATRDDVPRAVRTLAAAFADYPATRHTVDPDRHIERVTELQELFLTRVGLDIGKVWVADDGAAVAVWTTPESVEAGAVFAEIGPRMAELSGSRLAAQQQMEGLLAPHRPKEPAWFLATVGVSPDHQGKGLGSAVVLPGVEAAERAGVPAFLETSAPRNLPFYERLGFTVTADVEVPEGPRTWCMTRKPGA

SEQ ID NO: 3470 - protein, 726 aa, Artificial Sequence
  Synthetic Polypeptide
MALPVTALLLPLALLLHAARPDIQMTQSPSSLSASVGDRVTITCKASQGFNKYVAWYQQKPGKAPKLLIYYTSTLQPGVPSRFSGSGSGRDYTLTISSLQPEDFATYYCLQYGNLLYAFGQGTKVEIKRGGGGSGGGGSGGGGSEVQLVQSGAEVKKPGASVKVSCKASGYTFTSYWIGWVRQAPGQGLEWIGDIYPGGGYTNYNEKFKGRVTITRDTSTSTAYLELSSLRSEDTAVYYCARLDGSSYRGAMDSWGQGTLVTVSSTREQKLISEEDLAKPTTTPAPRPPTPAPTIASQPLSLRPEACRPAAGGAVHTRGLDFACDIYIWAPLAGTCGVLLLSLVITLYCKRGRKKLLYIFKQPFMRPVQTTQEEDGCSCRFPEEEEGGCELRVKFSRSADAPAYQQGQNQLYNELNLGRREEYDVLDKRRGRDPEMGGKPRRKNPQEGLYNELQKDKMAEAYSEIGMKGERRRGKGHDGLYQGLSTATKDTYDALHMQALPPRSSGSGEGRGSLLTCGDVEENPGPHMTEYKPTVRLATRDDVPRAVRTLAAAFADYPATRHTVDPDRHIERVTELQELFLTRVGLDIGKVWVADDGAAVAVWTTPESVEAGAVFAEIGPRMAELSGSRLAAQQQMEGLLAPHRPKEPAWFLATVGVSPDHQGKGLGSAVVLPGVEAAERAGVPAFLETSAPRNLPFYERLGFTVTADVEVPEGPRTWCMTRKPGA

SEQ ID NO: 3471 - protein, 730 aa, Artificial Sequence
  Synthetic Polypeptide
MALPVTALLLPLALLLHAARPDIQLTQSPSSLSASVGDRVTITCRASQSVDYDGDSYMNWYQQKPGKAPKLLIYAASYLESGVPSRFSGSGSGTDFTLTISSLQPEDFATYYCQQSHEDPYTFGQGTKVEIKRGGGGSGGGGSGGGGSEVQLVESGGGLVQPGGSLRLSCAVSGYSITSGYSWNWIRQAPGKGLEWVASITYDGSTNYNPSVKGRITISRDDSKNTFYLQMNSLRAEDTAVYYCARGSHYFGHWHFAVWGQGTLVTVSSTREQKLISEEDLAKPTTTPAPRPPTPAPTIASQPLSLRPEACRPAAGGAVHTRGLDFACDIYIWAPLAGTCGVLLLSLVITLYCKRGRKKLLYIFKQPFMRPVQTTQEEDGCSCRFPEEEEGGCELRVKFSRSADAPAYQQGQNQLYNELNLGRREEYDVLDKRRGRDPEMGGKPRRKNPQEGLYNELQKDKMAEAYSEIGMKGERRRGKGHDGLYQGLSTATKDTYDALHMQALPPRSSGSGEGRGSLLTCGDVEENPGPHMTEYKPTVRLATRDDVPRAVRTLAAAFADYPATRHTVDPDRHIERVTELQELFLTRVGLDIGKVWVADDGAAVAVWTTPESVEAGAVFAEIGPRMAELSGSRLAAQQQMEGLLAPHRPKEPAWFLATVGVSPDHQGKGLGSAVVLPGVEAAERAGVPAFLETSAPRNLPFYERLGFTVTADVEVPEGPRTWCMTRKPGA

SEQ ID NO: 3472 - protein, 722 aa, Artificial Sequence
  Synthetic Polypeptide
MALPVTALLLPLALLLHAARPDIQMTQSPSSLSASVGDRVTITCRASQDIRYYLNWYQQKPGKAPKLLIYVASSLQSGVPSRFSGSGSGTEFTLTVSSLQPEDFATYYCLQVYSTPRTFGQGTKVEIKGGGGSGGGGSGGGGSEVQLVESGGGLAKPGGSLRLSCAASGFRFTFNNYYMDWVRQAPGQGLEWVSRISSSGDPTWYADSVKGRFTISRENAKNTLFLQMNSLRAEDTAVYYCASLTTGSDSWGQGVLVTVSSTREQKLISEEDLAKPTTTPAPRPPTPAPTIASQPLSLRPEACRPAAGGAVHTRGLDFACDIYIWAPLAGTCGVLLLSLVITLYCKRGRKKLLYIFKQPFMRPVQTTQEEDGCSCRFPEEEEGGCELRVKFSRSADAPAYQQGQNQLYNELNLGRREEYDVLDKRRGRDPEMGGKPRRKNPQEGLYNELQKDKMAEAYSEIGMKGERRRGKGHDGLYQGLSTATKDTYDALHMQALPPRSSGSGEGRGSLLTCGDVEENPGPHMTEYKPTVRLATRDDVPRAVRTLAAAFADYPATRHTVDPDRHIERVTELQELFLTRVGLDIGKVWVADDGAAVAVWTTPESVEAGAVFAEIGPRMAELSGSRLAAQQQMEGLLAPHRPKEPAWFLATVGVSPDHQGKGLGSAVVLPGVEAAERAGVPAFLETSAPRNLPFYERLGFTVTADVEVPEGPRTWCMTRKPGA

SEQ ID NO: 3473 - protein, 723 aa, Artificial Sequence
  Synthetic Polypeptide
MALPVTALLLPLALLLHAARPEIVMTQSPATLSVSPGERATLSCRASQSVSRNLAWYQQKPGQAPRLLIYGASTRATGIPARFSGSGSGTEFTLTIGSLQSEDFAVYYCQQYKTWPRTFGQGTNVEIKGGGGSGGGGSGGGGSQVQLQQWGAGLLKPSETLSLTCAVFGGSFSGYYWSWIRQPPGKGLEWIGEINHRGNTNDNPSLKSRVTISVDTSKNQFALKLSSVTAADTAVYYCARERGYTYGNFDHWGQGTLVTVSSTREQKLISEEDLAKPTTTPAPRPPTPAPTIASQPLSLRPEACRPAAGGAVHTRGLDFACDIYIWAPLAGTCGVLLLSLVITLYCKRGRKKLLYIFKQPFMRPVQTTQEEDGCSCRFPEEEEGGCELRVKFSRSADAPAYQQGQNQLYNELNLGRREEYDVLDKRRGRDPEMGGKPRRKNPQEGLYNELQKDKMAEAYSEIGMKGERRRGKGHDGLYQGLSTATKDTYDALHMQALPPRSSGSGEGRGSLLTCGDVEENPGPHMTEYKPTVRLATRDDVPRAVRTLAAAFADYPATRHTVDPDRHIERVTELQELFLTRVGLDIGKVWVADDGAAVAVWTTPESVEAGAVFAEIGPRMAELSGSRLAAQQQMEGLLAPHRPKEPAWFLATVGVSPDHQGKGLGSAVVLPGVEAAERAGVPAFLETSAPRNLPFYERLGFTVTADVEVPEGPRTWCMTRKPGA

SEQ ID NO: 3474 - protein, 724 aa, Artificial Sequence
  Synthetic Polypeptide
MALPVTALLLPLALLLHAARPEIVMTPSSATLSVSPGERATLSCRASQSVSRNLAWYQQKPGQAPRLLIYGASTRATGIPARFSGSGSGTEFTLTISSLQSEDFAVYYCHQYSNWMCSFGQGTKLEIKGGGGSGGGGSGGGGSEVQLLESGGGLVQPGGSLRLSCAASGFTFSRYAMNWVRQAPGKGLEWVSGISGSGGRTYYADSVKGRFTISRDNSKNTLYLQMNSLRAEDTAVYYCAKDRDFWSGPFDYWGQGTLVTVSSTREQKLISEEDLAKPTTTPAPRPPTPAPTIASQPLSLRPEACRPAAGGAVHTRGLDFACDIYIWAPLAGTCGVLLLSLVITLYCKRGRKKLLYIFKQPFMRPVQTTQEEDGCSCRFPEEEEGGCELRVKFSRSADAPAYQQGQNQLYNELNLGRREEYDVLDKRRGRDPEMGGKPRRKNPQEGLYNELQKDKMAEAYSEIGMKGERRRGKGHDGLYQGLSTATKDTYDALHMQALPPRSSGSGEGRGSLLTCGDVEENPGPHMTEYKPTVRLATRDDVPRAVRTLAAAFADYPATRHTVDPDRHIERVTELQELFLTRVGLDIGKVWVADDGAAVAVWTTPESVEAGAVFAEIGPRMAELSGSRLAAQQQMEGLLAPHRPKEPAWFLATVGVSPDHQGKGLGSAVVLPGVEAAERAGVPAFLETSAPRNLPFYERLGFTVTADVEVPEGPRTWCMTRKPGA

SEQ ID NO: 3475 - protein, 729 aa, Artificial Sequence
  Synthetic Polypeptide
MALPVTALLLPLALLLHAARPDIQMTQSPSSLSASVGDRVTITCKASKNIRSYLAWYQQKPGKAPKLLIYSGSTLHSGVPSRFSGSGSGTDFTLTISSLQPEDFATYYCQQHHEYPLTFGQGTKVEIKRGGGGSGGGGSGGGGSQVQLQESGPGLVKPSETLSLTCTVSGYTITSGYDWSWIRQPPGKGLEWIGYINYGGSTNYKPSLGSRVTISVDTSKNQFSLKLSSVTAADTAVYYCARYNEYKSYIYDWYFDFWGQGTLVTVSSTREQKLISEEDLAKPTTTPAPRPPTPAPTIASQPLSLRPEACRPAAGGAVHTRGLDFACDIYIWAPLAGTCGVLLLSLVITLYCKRGRKKLLYIFKQPFMRPVQTTQEEDGCSCRFPEEEEGGCELRVKFSRSADAPAYQQGQNQLYNELNLGRREEYDVLDKRRGRDPEMGGKPRRKNPQEGLYNELQKDKMAEAYSEIGMKGERRRGKGHDGLYQGLSTATKDTYDALHMQALPPRSSGSGEGRGSLLTCGDVEENPGPHMTEYKPTVRLATRDDVPRAVRTLAAAFADYPATRHTVDPDRHIERVTELQELFLTRVGLDIGKVWVADDGAAVAVWTTPESVEAGAVFAEIGPRMAELSGSRLAAQQQMEGLLAPHRPKEPAWFLATVGVSPDHQGKGLGSAVVLPGVEAAERAGVPAFLETSAPRNLPFYERLGFTVTADVEVPEGPRTWCMTRKPGA

SEQ ID NO: 3476 - protein, 717 aa, Artificial Sequence
  Synthetic Polypeptide
MALPVTALLLPLALLLHAARPDDIQMTQSSSSFSVSLGDRVTITCMASEDIYIRLAWYQQKPGNAPRLLISAATSLETGVPSRFSGSGSGKDYTLSITSLQTEDVGTYYCQQYWSSPWTFGGGTKLEINGGGGSGGGGSGGGGSDVQLQESGPGLVKPSQSLSLTCTVTGYSITSDYTWNWIRQFPGNKLEWMGYITYSGSTSYNPSLKSRNSITRDTSKNQFFLQLNSVTTEDTATYYCARLGRRYTMDYWGQGTSVTVSSTREQKLISEEDLKIEVMYPPPYLDNEKSNGTIIHVKGKHLCPSPLFPGPSKPFWVLVVVGGVLACYSLLVTVAFIIFWVRSKRSRLLHSDYMNMTPRRPGPTRKHYQPYAPPRDFAAYRSRVKFSRSADAPAYQQGQNQLYNELNLGRREEYDVLDKRRGRDPEMGGKPRRKNPQEGLYNELQKDKMAEAYSEIGMKGERRRGKGHDGLYQGLSTATKDTYDALHMQALPPRSSGSGEGRGSLLTCGDVEENPGPHMTEYKPTVRLATRDDVPRAVRTLAAAFADYPATRHTVDPDRHIERVTELQELFLTRVGLDIGKVWVADDGAAVAVWTTPESVEAGAVFAEIGPRMAELSGSRLAAQQQMEGLLAPHRPKEPAWFLATVGVSPDHQGKGLGSAVVLPGVEAAERAGVPAFLETSAPRNLPFYERLGFTVTADVEVPEGPRTWCMTRKPGA

SEQ ID NO: 3477 - protein, 762 aa, Artificial Sequence
  Synthetic Polypeptide
MALPVTALLLPLALLLHAARPDDIQMTQSSSSFSVSLGDRVTITCMASEDIYIRLAWYQQKPGNAPRLLISAATSLETGVPSRFSGSGSGKDYTLSITSLQTEDVGTYYCQQYWSSPWTFGGGTKLEINGGGGSGGGGSGGGGSDVQLQESGPGLVKPSQSLSLTCTVTGYSITSDYTWNWIRQFPGNKLEWMGYITYSGSTSYNPSLKSRNSITRDTSKNQFFLQLNSVTTEDTATYYCARLGRRYTMDYWGQGTSVTVSSTREQKLISEEDLAKPTTTPAPRPPTPAPTIASQPLSLRPEACRPAAGGAVHTRGLDFACDIYIWAPLAGTCGVLLLSLVITLYCKRGRKKLLYIFKQPFMRPVQTTQEEDGCSCRFPEEEEGGCELRVKFSRSADAPAYQQGQNQLYNELNLGRREEYDVLDKRRGRDPEMGGKPRRKNPQEGLYNELQKDKMAEAYSEIGMKGERRRGKGHDGLYQGLSTATKDTYDALHMQALPPRSSGSGEGRGSLLTCGDVEENPGPMVSKGEELFTGVVPILVELDGDVNGHKFSVSGEGEGDATYGKLTLKFICTTGKLPVPWPTLVTTLTYGVQCFSRYPDHMKQHDFFKSAMPEGYVQERTIFFKDDGNYKTRAEVKFEGDTLVNRIELKGIDFKEDGNILGHKLEYNYNSHNVYIMADKQKNGIKVNFKIRHNIEDGSVQLADHYQQNTPIGDGPVLLPDNHYLSTQSALSKDPNEKRDHMVLLEFVTAAGITLGMDELYK

SEQ ID NO: 3478 - protein, 718 aa, Artificial Sequence
  Synthetic Polypeptide
MALPVTALLLPLALLLHAARPDQIVLTQSPAIMSASPGEKVTISCSASSSVSYMYWYQQKPGSSPKPWIYRTSNLASGVPARFSGSGSGTSYSLTISNMEAEDAAAYYCQQYHSYPTTFGGGTKLEVKGGGGSGGGGSGGGGSEVQLVESGGGLVQPKGSLKLSCAASGFSFNTYAMNWVRQAPGKGLEWIAHIRSKSNNFATYYADSVKDRFSISRDASENILFLQMNNLKTEDTAMYYCVRQGGDFPMDYWGQGTSVTVSSTREQKLISEEDLKIEVMYPPPYLDNEKSNGTIIHVKGKHLCPSPLFPGPSKPFWVLVVVGGVLACYSLLVTVAFIIFWVRSKRSRLLHSDYMNMTPRRPGPTRKHYQPYAPPRDFAAYRSRVKFSRSADAPAYQQGQNQLYNELNLGRREEYDVLDKRRGRDPEMGGKPRRKNPQEGLYNELQKDKMAEAYSEIGMKGERRRGKGHDGLYQGLSTATKDTYDALHMQALPPRSSGSGEGRGSLLTCGDVEENPGPHMTEYKPTVRLATRDDVPRAVRTLAAAFADYPATRHTVDPDRHIERVTELQELFLTRVGLDIGKVWVADDGAAVAVWTTPESVEAGAVFAEIGPRMAELSGSRLAAQQQMEGLLAPHRPKEPAWFLATVGVSPDHQGKGLGSAVVLPGVEAAERAGVPAFLETSAPRNLPFYERLGFTVTADVEVPEGPRTWCMTRKPGA

SEQ ID NO: 3479 - protein, 718 aa, Artificial Sequence
  Synthetic Polypeptide
MALPVTALLLPLALLLHAARPDIVMTQAAPSIPVTPGESVSISCRSDKSLLHSNGNTYLFWFLQRPGQSPQLLIYRMSNLASGVPDRFSGSGSGTAFTLRISGVEAEDVGVYYCMQHLEYPYTFGGGTKLEIKGGGGSGGGGSGGGGSQVQLQQSGPELVKPGASVKMSCKASGYAFSSSWLNWVRQRPGKGLEWIGRIYPGDGENHYNGKFKGKATLTADKSSSTGYMQLSSLTSEDSAVYFCASYYEGGYWGQGTLITVSATREQKLISEEDLKIEVMYPPPYLDNEKSNGTIIHVKGKHLCPSPLFPGPSKPFWVLVVVGGVLACYSLLVTVAFIIFWVRSKRSRLLHSDYMNMTPRRPGPTRKHYQPYAPPRDFAAYRSRVKFSRSADAPAYQQGQNQLYNELNLGRREEYDVLDKRRGRDPEMGGKPRRKNPQEGLYNELQKDKMAEAYSEIGMKGERRRGKGHDGLYQGLSTATKDTYDALHMQALPPRSSGSGEGRGSLLTCGDVEENPGPHMTEYKPTVRLATRDDVPRAVRTLAAAFADYPATRHTVDPDRHIERVTELQELFLTRVGLDIGKVWVADDGAAVAVWTTPESVEAGAVFAEIGPRMAELSGSRLAAQQQMEGLLAPHRPKEPAWFLATVGVSPDHQGKGLGSAVVLPGVEAAERAGVPAFLETSAPRNLPFYERLGFTVTADVEVPEGPRTWCMTRKPGA

SEQ ID NO: 3480 - protein, 717 aa, Artificial Sequence
  Synthetic Polypeptide
MALPVTALLLPLALLLHAARPDIVLTQSPASLAVSLGQSVTISCRASESVEYYGTSLMQWYQQKPGQPPKLLIYGASNVESGVPARFSGSGSGTDFSLNIHPVEEDDIAMYFCQQSRKVPWTFGGGTKLEIKGGGGSGGGGSGGGGSEVKLVESGGGLVKPGGSRKLSCAASGFTFSSYTMSWVRQTPAKRLEWVATISSGSSTIYYADTVKGRFTISRDNAKNTLFLQMTSLRSEDTAMYYCARRWFLDCWGQGTTLTVSSTREQKLISEEDLKIEVMYPPPYLDNEKSNGTIIHVKGKHLCPSPLFPGPSKPFWVLVVVGGVLACYSLLVTVAFIIFWVRSKRSRLLHSDYMNMTPRRPGPTRKHYQPYAPPRDFAAYRSRVKFSRSADAPAYQQGQNQLYNELNLGRREEYDVLDKRRGRDPEMGGKPRRKNPQEGLYNELQKDKMAEAYSEIGMKGERRRGKGHDGLYQGLSTATKDTYDALHMQALPPRSSGSGEGRGSLLTCGDVEENPGPHMTEYKPTVRLATRDDVPRAVRTLAAAFADYPATRHTVDPDRHIERVTELQELFLTRVGLDIGKVWVADDGAAVAVWTTPESVEAGAVFAEIGPRMAELSGSRLAAQQQMEGLLAPHRPKEPAWFLATVGVSPDHQGKGLGSAVVLPGVEAAERAGVPAFLETSAPRNLPFYERLGFTVTADVEVPEGPRTWCMTRKPGA

SEQ ID NO: 3481 - protein, 720 aa, Artificial Sequence
  Synthetic Polypeptide
MALPVTALLLPLALLLHAARPDQVQLQQSGPGLVKPSETLSLTCTVSGDSISSYYWSWIRQPPGKGLEWIGYIYYSGSTNYNPSLKSRVTISVDTSKSQFSLKLSSVTAADTAVYYCARGRYFDVWGRGTMVTSSGGGGSGGGGSGGGGSSSYVLTQPPSVSGSPGQSITISCTGTSSDVGGYNYVSWYQQHPGKAPKLMIYEGSKRPSGVSNRFSGSKSGNTASLTISGLQAEDEADYYCSSYTTRSTRVFGGGTKLTVLGAAATREQKLISEEDLKIEVMYPPPYLDNEKSNGTIIHVKGKHLCPSPLFPGPSKPFWVLVVVGGVLACYSLLVTVAFIIFWVRSKRSRLLHSDYMNMTPRRPGPTRKHYQPYAPPRDFAAYRSRVKFSRSADAPAYQQGQNQLYNELNLGRREEYDVLDKRRGRDPEMGGKPRRKNPQEGLYNELQKDKMAEAYSEIGMKGERRRGKGHDGLYQGLSTATKDTYDALHMQALPPRSSGSGEGRGSLLTCGDVEENPGPHMTEYKPTVRLATRDDVPRAVRTLAAAFADYPATRHTVDPDRHIERVTELQELFLTRVGLDIGKVWVADDGAAVAVWTTPESVEAGAVFAEIGPRMAELSGSRLAAQQQMEGLLAPHRPKEPAWFLATVGVSPDHQGKGLGSAVVLPGVEAAERAGVPAFLETSAPRNLPFYERLGFTVTADVEVPEGPRTWCMTRKPGA

SEQ ID NO: 3482 - protein, 721 aa, Artificial Sequence
  Synthetic Polypeptide
MALPVTALLLPLALLLHAARPDIVMTQSPLSLPVTPGEPASISCRSSKSLLHSNGNTYLYWFQQKPGQAPRLLIYRMSNLASGVPDRFSGSGSGTAFTLKISRVEAEDVGVYYCMQHIEYPFTFGQGTKLEIKGGGGSGGGGSGGGGSQVQLVQSGPEVKKPGASVKVSCKASGYTFTNSWMNWVRQRPGKGLEWIGRIYPGDGETIYNGKFRVRVTITADESTSTAYMELSSLRSEDTAVYYCARGYDDYSFAYWGQGTTVTVSSTREQKLISEEDLKIEVMYPPPYLDNEKSNGTIIHVKGKHLCPSPLFPGPSKPFWVLVVVGGVLACYSLLVTVAFIIFWVRSKRSRLLHSDYMNMTPRRPGPTRKHYQPYAPPRDFAAYRSRVKFSRSADAPAYQQGQNQLYNELNLGRREEYDVLDKRRGRDPEMGGKPRRKNPQEGLYNELQKDKMAEAYSEIGMKGERRRGKGHDGLYQGLSTATKDTYDALHMQALPPRSSGSGEGRGSLLTCGDVEENPGPHMTEYKPTVRLATRDDVPRAVRTLAAAFADYPATRHTVDPDRHIERVTELQELFLTRVGLDIGKVWVADDGAAVAVWTTPESVEAGAVFAEIGPRMAELSGSRLAAQQQMEGLLAPHRPKEPAWFLATVGVSPDHQGKGLGSAVVLPGVEAAERAGVPAFLETSAPRNLPFYERLGFTVTADVEVPEGPRTWCMTRKPGA

SEQ ID NO: 3483 - protein, 642 aa, Artificial Sequence
  Synthetic Polypeptide
MELTELLLVVMLLLTARLTLSSPAPPACDLRVLSKLLRDSHVLHSRLSQCPEVHPLPTPVLLPAVDFSLGEWKTQMEETKAQDILGAVTLLLEGVMAARGQLGPTCLSSLLGQLSGQVRLLLGALQSLLGTQLPPQGRTTAHKDPNAIFLSFQHLLRGKVRFLMLVGGSTLCVRRAPPTTAVPSRTSTREQKLISEEDLKIEVMYPPPYLDNEKSNGTIIHVKGKHLCPSPLFPGPSKPFWVLVVVGGVLACYSLLVTVAFIIFWVRSKRSRLLHSDYMNMTPRRPGPTRKHYQPYAPPRDFAAYRSRVKFSRSADAPAYQQGQNQLYNELNLGRREEYDVLDKRRGRDPEMGGKPRRKNPQEGLYNELQKDKMAEAYSEIGMKGERRRGKGHDGLYQGLSTATKDTYDALHMQALPPRSSGSGEGRGSLLTCGDVEENPGPHMTEYKPTVRLATRDDVPRAVRTLAAAFADYPATRHTVDPDRHIERVTELQELFLTRVGLDIGKVWVADDGAAVAVWTTPESVEAGAVFAEIGPRMAELSGSRLAAQQQMEGLLAPHRPKEPAWFLATVGVSPDHQGKGLGSAVVLPGVEAAERAGVPAFLETSAPRNLPFYERLGFTVTADVEVPEGPRTWCMTRKPGA

SEQ ID NO: 3484 - protein, 642 aa, Artificial Sequence
  Synthetic Polypeptide
MELTDLLLAAMLLAVARLTLSSPVAPACDPRLLNKLLRDSHLLHSRLSQCPDVDPLSIPVLLPAVDFSLGEWKTQTEQSKAQDILGAVSLLLEGVMAARGQLEPSCLSSLLGQLSGQVRLLLGALQGLLGTQLPLQGRTTAHKDPNALFLSLQQLLRGKVRFLLLVEGPTLCVRRTLPTTAVPSSTSTREQKLISEEDLKIEVMYPPPYLDNEKSNGTIIHVKGKHLCPSPLFPGPSKPFWVLVVVGGVLACYSLLVTVAFIIFWVRSKRSRLLHSDYMNMTPRRPGPTRKHYQPYAPPRDFAAYRSRVKFSRSADAPAYQQGQNQLYNELNLGRREEYDVLDKRRGRDPEMGGKPRRKNPQEGLYNELQKDKMAEAYSEIGMKGERRRGKGHDGLYQGLSTATKDTYDALHMQALPPRSSGSGEGRGSLLTCGDVEENPGPHMTEYKPTVRLATRDDVPRAVRTLAAAFADYPATRHTVDPDRHIERVTELQELFLTRVGLDIGKVWVADDGAAVAVWTTPESVEAGAVFAEIGPRMAELSGSRLAAQQQMEGLLAPHRPKEPAWFLATVGVSPDHQGKGLGSAVVLPGVEAAERAGVPAFLETSAPRNLPFYERLGFTVTADVEVPEGPRTWCMTRKPGA

SEQ ID NO: 3485 - protein, 1034 aa, Artificial Sequence
  Synthetic Polypeptide
MALPVTALLLPLALLLHAARPDDIQMTQSSSSFSVSLGDRVTITCMASEDIYIRLAWYQQKPGNAPRLLISAATSLETGVPSRFSGSGSGKDYTLSITSLQTEDVGTYYCQQYWSSPWTFGGGTKLEINGGGGSGGGGSGGGGSDVQLQESGPGLVKPSQSLSLTCTVTGYSITSDYTWNWIRQFPGNKLEWMGYITYSGSTSYNPSLKSRNSITRDTSKNQFFLQLNSVTTEDTATYYCARLGRRYTMDYWGQGTSVTVSSTREQKLISEEDLAKPTTTPAPRPPTPAPTIASQPLSLRPEACRPAAGGAVHTRGLDFACDIYIWAPLAGTCGVLLLSLVITLYCKRGRKKLLYIFKQPFMRPVQTTQEEDGCSCRFPEEEEGGCELRVKFSRSADAPAYQQGQNQLYNELNLGRREEYDVLDKRRGRDPEMGGKPRRKNPQEGLYNELQKDKMAEAYSEIGMKGERRRGKGHDGLYQGLSTATKDTYDALHMQALPPRSRGSGATNFSLLKQAGDVEENPGPGIHMDWIWRILFLVGAATGAHSEVQLVESGGGLVQPGGSLRLSCAASGSVFKINVMAWYRQAPGKGRELVAGIISGGSTSYADSVKGRFTISRDNAKNTLYLQMNSLRPEDTAVYYCAFITTESDYDLGRRYWGQGTLVTVSSGGGGSGGGGSGGGGSEVQLVESGGGLVQPGNSLRLSCAASGFTFSSFGMSWVRQAPGKGLEWVSSISGSGSDTLYADSVKGRFTISRDNAKTTLYLQMNSLRPEDTAVYYCTIGGSLSRSSQGTLVTVSSLETDFYDYKDDDDKTSGSGEGRGSLLTCGDVEENPGPHMTEYKPTVRLATRDDVPRAVRTLAAAFADYPATRHTVDPDRHIERVTELQELFLTRVGLDIGKVWVADDGAAVAVWTTPESVEAGAVFAEIGPRMAELSGSRLAAQQQMEGLLAPHRPKEPAWFLATVGVSPDHQGKGLGSAVVLPGVEAAERAGVPAFLETSAPRNLPFYERLGFTVTADVEVPEGPRTWCMTRKPGA

SEQ ID NO: 3486 - protein, 1026 aa, Artificial Sequence
  Synthetic Polypeptide
MALPVTALLLPLALLLHAARPDDIQMTQSSSSFSVSLGDRVTITCMASEDIYIRLAWYQQKPGNAPRLLISAATSLETGVPSRFSGSGSGKDYTLSITSLQTEDVGTYYCQQYWSSPWTFGGGTKLEINGGGGSGGGGSGGGGSDVQLQESGPGLVKPSQSLSLTCTVTGYSITSDYTWNWIRQFPGNKLEWMGYITYSGSTSYNPSLKSRNSITRDTSKNQFFLQLNSVTTEDTATYYCARLGRRYTMDYWGQGTSVTVSSTREQKLISEEDLAKPTTTPAPRPPTPAPTIASQPLSLRPEACRPAAGGAVHTRGLDFACDIYIWAPLAGTCGVLLLSLVITLYCGRARVKFSRSADAPAYQQGQNQLYNELNLGRREEYDVLDKRRGRDPEMGGKPRRKNPQEGLYNELQKDKMAEAYSEIGMKGERRRGKGHDGLYQGLSTATKDTYDALHMQALPPRSRGSGATNFSLLKQAGDVEENPGPGIHMTRGVQVETISPGDGRTFPKRGQTCVVHYTGMLEDGKKVDSSRDRNKPFKFMLGKQEVIRGWEEGVAQMSVGQRAKLTISPDYAYGATGHPGIIPPHATLVFDVELLKLEGIHMATYEVLCEVARKLGTDDREVVLFLLNVFIPQPTLAQLIGALRALKEEGRLTFPLLAECLFRAGRRDLLRDLLHLDPRFLERHLAGTMSYFSPYQLTVLHVDGELCARDIRSLIFLSKDTIGSRSTPQTFLHWVYCMENLDLLGPTDVDALMSMLRSLSRVDLQRQVQTLMGLHLSGPSHSQHYRHTPLETDFYDYKDDDDKTSGSGEGRGSLLTCGDVEENPGPHMTEYKPTVRLATRDDVPRAVRTLAAAFADYPATRHTVDPDRHIERVTELQELFLTRVGLDIGKVWVADDGAAVAVWTTPESVEAGAVFAEIGPRMAELSGSRLAAQQQMEGLLAPHRPKEPAWFLATVGVSPDHQGKGLGSAVVLPGVEAAERAGVPAFLETSAPRNLPFYERLGFTVTADVEVPEGPRTWCMTRKPGA

SEQ ID NO: 3487 - protein, 1074 aa, Artificial Sequence
  Synthetic Polypeptide
MALPVTALLLPLALLLHAARPDDIQMTQSSSSFSVSLGDRVTITCMASEDIYIRLAWYQQKPGNAPRLLISAATSLETGVPSRFSGSGSGKDYTLSITSLQTEDVGTYYCQQYWSSPWTFGGGTKLEINGGGGSGGGGSGGGGSDVQLQESGPGLVKPSQSLSLTCTVTGYSITSDYTWNWIRQFPGNKLEWMGYITYSGSTSYNPSLKSRNSITRDTSKNQFFLQLNSVTTEDTATYYCARLGRRYTMDYWGQGTSVTVSSTREQKLISEEDLAKPTTTPAPRPPTPAPTIASQPLSLRPEACRPAAGGAVHTRGLDFACDIYIWAPLAGTCGVLLLSLVITLYCGRARVKFSRSADAPAYQQGQNQLYNELNLGRREEYDVLDKRRGRDPEMGGKPRRKNPQEGLYNELQKDKMAEAYSEIGMKGERRRGKGHDGLYQGLSTATKDTYDALHMQALPPRSRGSGATNFSLLKQAGDVEENPGPGIRDYKDDDDKAHFPGFGQSLLYGYPVYVFGDCVQADWCPVSGGLCSTRLHRHALLATCPEHQLTWDPIDGRVVSSPLQYLIPRLPSFPTQRTSRTLKVLTPPTTPVSPKVPPAFFQSMRKHTPYRNGCLEPTLGDQLPSLAFPEPGLRPQNIYTTWGKTVVCLYLYQLSPPMTWPLIPHVIFCHPRQLGAFLTKVPLKRLEELLYKMFLHTGAVIVLPEDDLPTTMFQPVRAPCIQTAWCTGLLPYHSILTTPGLIWTFNDGSPMISGPCPKAGQPSLVVQSSLLIFEKFQTKAFHPSYLLSHQLIQYSSFHNLHLLFDEYTNIPVSRSFNKGEADDNGDQPPEPAAQGESSTQKVRPSHTNNPKTSGSGEGRGSLLTCGDVEENPGPHMTEYKPTVRLATRDDVPRAVRTLAAAFADYPATRHTVDPDRHIERVTELQELFLTRVGLDIGKVWVADDGAAVAVWTTPESVEAGAVFAEIGPRMAELSGSRLAAQQQMEGLLAPHRPKEPAWFLATVGVSPDHQGKGLGSAVVLPGVEAAERAGVPAFLETSAPRNLPFYERLGFTVTADVEVPEGPRTWCMTRKPGA

SEQ ID NO: 3488 - protein, 1107 aa, Artificial Sequence
  Synthetic Polypeptide
MALPVTALLLPLALLLHAARPDIQMTQTTSSLSASLGDRVTISCRASQDISKYLNWYQQKPDGTVKLLIYHTSRLHSGVPSRFSGSGSGTDYSLTISNLEQEDIATYFCQQGNTLPYTFGGGTKLEITGGGGSGGGGSGGGGSEVKLQESGPGLVAPSQSLSVTCTVSGVSLPDYGVSWIRQPPRKGLEWLGVIWGSETTYYNSALKSRLTIIKDNSKSQVFLKMNSLQTDDTAIYYCAKHYYYGGSYAMDYWGQGTSVTVSSRVEQKLISEEDLAKPTTTPAPRPPTPAPTIASQPLSLRPEACRPAAGGAVHTRGLDFACDIYIWAPLAGTCGVLLLSLVITLYCKRGRKKLLYIFKQPFMRPVQTTQEEDGCSCRFPEEEEGGCELRVKFSRSADAPAYQQGQNQLYNELNLGRREEYDVLDKRRGRDPEMGGKPRRKNPQEGLYNELQKDKMAEAYSEIGMKGERRRGKGHDGLYQGLSTATKDTYDALHMQALPPRSRGSGATNFSLLKQAGDVEENPGPGIRMAHFPGFGQSLLYGYPVYVFGDCVQADWCPVSGGLCSTRLHRHALLATCPEHQLTWDPIDGRVVSSPLQYLIPRLPSFPTQRTSRTLKVLTPPTTPVSPKVPPAFFQSMRKHTPYRNGCLEPTLGDQLPSLAFPEPGLRPQNIYTTWGKTVVCLYLYQLSPPMTWPLIPHVIFCHPRQLGAFLTKVPLKRLEELLYKMFLHTGAVIVLPEDDLPTTMFQPVRAPCIQTAWCTGLLPYHSILTTPGLIWTFNDGSPMISGPCPKAGQPSLVVQSSLLIFEKFQTKAFHPSYLLSHQLIQYSSFHNLHLLFDEYTNIPVSRSFNKGEADDNGDQPPEPAAQGESSTQKVRPSHTNNPKTSGSGEGRGSLLTCGDVEENPGPHMTEYKPTVRLATRDDVPRAVRTLAAAFADYPATRHTVDPDRHIERVTELQELFLTRVGLDIGKVWVADDGAAVAVWTTPESVEAGAVFAEIGPRMAELSGSRLAAQQQMEGLLAPHRPKEPAWFLATVGVSPDHQGKGLGSAVVLPGVEAAERAGVPAFLETSAPRNLPFYERLGFTVTADVEVPEGPRTWCMTRKPGA

SEQ ID NO: 3489 - protein, 1104 aa, Artificial Sequence
  Synthetic Polypeptide
MALPVTALLLPLALLLHAARPDDIQMTQSSSSFSVSLGDRVTITCMASEDIYIRLAWYQQKPGNAPRLLISAATSLETGVPSRFSGSGSGKDYTLSITSLQTEDVGTYYCQQYWSSPWTFGGGTKLEINGGGGSGGGGSGGGGSDVQLQESGPGLVKPSQSLSLTCTVTGYSITSDYTWNWIRQFPGNKLEWMGYITYSGSTSYNPSLKSRNSITRDTSKNQFFLQLNSVTTEDTATYYCARLGRRYTMDYWGQGTSVTVSSTREQKLISEEDLAKPTTTPAPRPPTPAPTIASQPLSLRPEACRPAAGGAVHTRGLDFACDIYIWAPLAGTCGVLLLSLVITLYCKRGRKKLLYIFKQPFMRPVQTTQEEDGCSCRFPEEEEGGCELRVKFSRSADAPAYQQGQNQLYNELNLGRREEYDVLDKRRGRDPEMGGKPRRKNPQEGLYNELQKDKMAEAYSEIGMKGERRRGKGHDGLYQGLSTATKDTYDALHMQALPPRSRGSGATNFSLLKQAGDVEENPGPGITMTRGVQVETISPGDGRTFPKRGQTCVVHYTGMLEDGKKVDSSRDRNKPFKFMLGKQEVIRGWEEGVAQMSVGQRAKLTISPDYAYGATGHPGIIPPHATLVFDVELLKLEGIHMATYEVLCEVARKLGTDDREVVLFLLNVFIPQPTLAQLIGALRALKEEGRLTFPLLAECLFRAGRRDLLRDLLHLDPRFLERHLAGTMSYFSPYQLTVLHVDGELCARDIRSLIFLSKDTIGSRSTPQTFLHWVYCMENLDLLGPTDVDALMSMLRSLSRVDLQRQVQTLMGLHLSGPSHSQHYRHTPLETDFYDYKDDDDKTSGSGEGRGSLLTCGDVEENPGPMVSKGEELFTGVVPILVELDGDVNGHKFSVSGEGEGDATYGKLTLKFICTTGKLPVPWPTLVTTLTYGVQCFSRYPDHMKQHDFFKSAMPEGYVQERTIFFKDDGNYKTRAEVKFEGDTLVNRIELKGIDFKEDGNILGHKLEYNYNSHNVYIMADKQKNGIKVNFKIRHNIEDGSVQLADHYQQNTPIGDGPVLLPDNHYLSTQSALSKDPNEKRDHMVLLEFVTAAGITLGMDELYK

SEQ ID NO: 3490 - protein, 1062 aa, Artificial Sequence
  Synthetic Polypeptide
MALPVTALLLPLALLLHAARPDDIQMTQSSSSFSVSLGDRVTITCMASEDIYIRLAWYQQKPGNAPRLLISAATSLETGVPSRFSGSGSGKDYTLSITSLQTEDVGTYYCQQYWSSPWTFGGGTKLEINGGGGSGGGGSGGGGSDVQLQESGPGLVKPSQSLSLTCTVTGYSITSDYTWNWIRQFPGNKLEWMGYITYSGSTSYNPSLKSRNSITRDTSKNQFFLQLNSVTTEDTATYYCARLGRRYTMDYWGQGTSVTVSSTREQKLISEEDLAKPTTTPAPRPPTPAPTIASQPLSLRPEACRPAAGGAVHTRGLDFACDIYIWAPLAGTCGVLLLSLVITLYCKRGRKKLLYIFKQPFMRPVQTTQEEDGCSCRFPEEEEGGCELRVKFSRSADAPAYQQGQNQLYNELNLGRREEYDVLDKRRGRDPEMGGKPRRKNPQEGLYNELQKDKMAEAYSEIGMKGERRRGKGHDGLYQGLSTATKDTYDALHMQALPPRSRGSGATNFSLLKQAGDVEENPGPGILMDWIWRILFLVGAATGAHSEIVLTQSPATLSLSPGERATLSCSASISVSYMYWYQQKPGQAPRLLIYDMSNLASGIPARFSGSGSGTDFTLTISSLEPEDFAVYYCMQWSGYPYTFGGGTKVEIKGGGGSGGGGSGGGGSEVQLVESGGGLVQPGGSLRLSCAASGFTFSPFAMSWVRQAPGKGLEWVAKISPGGSWTYYSDTVTGRFTISRDNAKNSLYLQMNSLRAEDTAVYYCARQLWGYYALDIWGQGTTVTVSSLETDFYDYKDDDDKTSGSGEGRGSLLTCGDVEENPGPMVSKGEELFTGVVPILVELDGDVNGHKFSVSGEGEGDATYGKLTLKFICTTGKLPVPWPTLVTTLTYGVQCFSRYPDHMKQHDFFKSAMPEGYVQERTIFFKDDGNYKTRAEVKFEGDTLVNRIELKGIDFKEDGNILGHKLEYNYNSHNVYIMADKQKNGIKVNFKIRHNIEDGSVQLADHYQQNTPIGDGPVLLPDNHYLSTQSALSKDPNEKRDHMVLLEFVTAAGITLGMDELYK

SEQ ID NO: 3491 - protein, 1063 aa, Artificial Sequence
  Synthetic Polypeptide
MALPVTALLLPLALLLHAARPDDIQMTQSSSSFSVSLGDRVTITCMASEDIYIRLAWYQQKPGNAPRLLISAATSLETGVPSRFSGSGSGKDYTLSITSLQTEDVGTYYCQQYWSSPWTFGGGTKLEINGGGGSGGGGSGGGGSDVQLQESGPGLVKPSQSLSLTCTVTGYSITSDYTWNWIRQFPGNKLEWMGYITYSGSTSYNPSLKSRNSITRDTSKNQFFLQLNSVTTEDTATYYCARLGRRYTMDYWGQGTSVTVSSTREQKLISEEDLAKPTTTPAPRPPTPAPTIASQPLSLRPEACRPAAGGAVHTRGLDFACDIYIWAPLAGTCGVLLLSLVITLYCKRGRKKLLYIFKQPFMRPVQTTQEEDGCSCRFPEEEEGGCELRVKFSRSADAPAYQQGQNQLYNELNLGRREEYDVLDKRRGRDPEMGGKPRRKNPQEGLYNELQKDKMAEAYSEIGMKGERRRGKGHDGLYQGLSTATKDTYDALHMQALPPRSRGSGATNFSLLKQAGDVEENPGPGILMDWIWRILFLVGAATGAHSQVQLQESGPGLVKPSETLSLTCAVSGYSISDDHAVSWVRQPPGEGLEWIGFISYSGITNYNPTLQDRVTISRDNSKNTLYLQMNSLRAEDTAVYYCARLLARATAMDVWGEGTLVTVSSGGGGSGGGGSGGGGSDIQMTQSPSSLSASVGDSVTITCQASQDISSYLNWYQQKPGKAPELLIYYGSELESGVPSRFSGSGSGTDFTFTISSLEAEDAATYYCGQGNRLPYTFGQGTKVEIELETDFYDYKDDDDKTSGSGEGRGSLLTCGDVEENPGPMVSKGEELFTGVVPILVELDGDVNGHKFSVSGEGEGDATYGKLTLKFICTTGKLPVPWPTLVTTLTYGVQCFSRYPDHMKQHDFFKSAMPEGYVQERTIFFKDDGNYKTRAEVKFEGDTLVNRIELKGIDFKEDGNILGHKLEYNYNSHNVYIMADKQKNGIKVNFKIRHNIEDGSVQLADHYQQNTPIGDGPVLLPDNHYLSTQSALSKDPNEKRDHMVLLEFVTAAGITLGMDELYK

SEQ ID NO: 3492 - protein, 756 aa, Artificial Sequence
  Synthetic Polypeptide
MALPVTALLLPLALLLHAARPDDIQMTQSSSSFSVSLGDRVTITCMASEDIYIRLAWYQQKPGNAPRLLISAATSLETGVPSRFSGSGSGKDYTLSITSLQTEDVGTYYCQQYWSSPWTFGGGTKLEINGGGGSGGGGSGGGGSDVQLQESGPGLVKPSQSLSLTCTVTGYSITSDYTWNWIRQFPGNKLEWMGYITYSGSTSYNPSLKSRNSITRDTSKNQFFLQLNSVTTEDTATYYCARLGRRYTMDYWGQGTSVTVSSTREQKLISEEDLKIEVMYPPPYLDNEKSNGTIIHVKGKHLCPSPLFPGPSKPFWVLVVVGGVLACYSLLVTVAFIIFWVRSKRSRLLHSDYMNMTPRRPGPTRKHYQPYAPPRDFAAYRSRVKFSRSADAPAYQQGQNQLYNELNLGRREEYDVLDKRRGRDPEMGGKPRRKNPQEGLYNELQKDKMAEAYSEIGMKGERRRGKGHDGLYQGLSTATKDTYDALHMQALPPRSSGSGEGRGSLLTCGDVEENPGPMVSKGEELFTGVVPILVELDGDVNGHKFSVSGEGEGDATYGKLTLKFICTTGKLPVPWPTLVTTLTYGVQCFSRYPDHMKQHDFFKSAMPEGYVQERTIFFKDDGNYKTRAEVKFEGDTLVNRIELKGIDFKEDGNILGHKLEYNYNSHNVYIMADKQKNGIKVNFKIRHNIEDGSVQLADHYQQNTPIGDGPVLLPDNHYLSTQSALSKDPNEKRDHMVLLEFVTAAGITLGMDELYK

SEQ ID NO: 3493 - protein, 855 aa, Artificial Sequence
  Synthetic Polypeptide
MALPVTALLLPLALLLHAARPDDIQMTQSSSSFSVSLGDRVTITCMASEDIYIRLAWYQQKPGNAPRLLISAATSLETGVPSRFSGSGSGKDYTLSITSLQTEDVGTYYCQQYWSSPWTFGGGTKLEINGGGGSGGGGSGGGGSDVQLQESGPGLVKPSQSLSLTCTVTGYSITSDYTWNWIRQFPGNKLEWMGYITYSGSTSYNPSLKSRNSITRDTSKNQFFLQLNSVTTEDTATYYCARLGRRYTMDYWGQGTSVTVSSTREQKLISEEDLAKPTTTPAPRPPTPAPTIASQPLSLRPEACRPAAGGAVHTRGLDFACDIYIWAPLAGTCGVLLLSLVITLYCKRGRKKLLYIFKQPFMRPVQTTQEEDGCSCRFPEEEEGGCELRVKFSRSADAPAYQQGQNQLYNELNLGRREEYDVLDKRRGRDPEMGGKPRRKNPQEGLYNELQKDKMAEAYSEIGMKGERRRGKGHDGLYQGLSTATKDTYDALHMQALPPRSRGSGATNFSLLKQAGDVEENPGPGILTMDWIWRILFLVGAATGAHSGHRPLDKKREEAPSLRPAPPPISGGGYRSGGSLETDFYDYKDDDDKTSGSGEGRGSLLTCGDVEENPGPMVSKGEELFTGVVPILVELDGDVNGHKFSVSGEGEGDATYGKLTLKFICTTGKLPVPWPTLVTTLTYGVQCFSRYPDHMKQHDFFKSAMPEGYVQERTIFFKDDGNYKTRAEVKFEGDTLVNRIELKGIDFKEDGNILGHKLEYNYNSHNVYIMADKQKNGIKVNFKIRHNIEDGSVQLADHYQQNTPIGDGPVLLPDNHYLSTQSALSKDPNEKRDHMVLLEFVTAAGITLGMDELYK

SEQ ID NO: 3494 - protein, 1005 aa, Artificial Sequence
  Synthetic Polypeptide
MALPVTALLLPLALLLHAARPDDIQMTQSSSSFSVSLGDRVTITCMASEDIYIRLAWYQQKPGNAPRLLISAATSLETGVPSRFSGSGSGKDYTLSITSLQTEDVGTYYCQQYWSSPWTFGGGTKLEINGGGGSGGGGSGGGGSDVQLQESGPGLVKPSQSLSLTCTVTGYSITSDYTWNWIRQFPGNKLEWMGYITYSGSTSYNPSLKSRNSITRDTSKNQFFLQLNSVTTEDTATYYCARLGRRYTMDYWGQGTSVTVSSTREQKLISEEDLAKPTTTPAPRPPTPAPTIASQPLSLRPEACRPAAGGAVHTRGLDFACDIYIWAPLAGTCGVLLLSLVITLYCKRGRKKLLYIFKQPFMRPVQTTQEEDGCSCRFPEEEEGGCELRVKFSRSADAPAYQQGQNQLYNELNLGRREEYDVLDKRRGRDPEMGGKPRRKNPQEGLYNELQKDKMAEAYSEIGMKGERRRGKGHDGLYQGLSTATKDTYDALHMQALPPRSRGSGATNFSLLKQAGDVEENPGPGIHMSDSKEVPSLPFLRHLLEELDSHEDSLLLFLCHDAAPGCTTVTQALCSLSQQRKLTLAALVEMLYVLQRMDLLKSRFGLSKEGAEQLLGTSFLTRYRKLMVCVGEELDSSELRALRLFACNLNPSLSTALSESSRFVELVLALENVGLVSPSSVSVLADMLRTLRRLDLCQQLVEYEQQEQARYRYCYAASPSLPVRTLRRGHGASEHEQLCMPVQESSDSPELLRTPVQESSSDSPEQTTLETDFYDYKDDDDKTSGSGEGRGSLLTCGDVEENPGPHMTEYKPTVRLATRDDVPRAVRTLAAAFADYPATRHTVDPDRHIERVTELQELFLTRVGLDIGKVWVADDGAAVAVWTTPESVEAGAVFAEIGPRMAELSGSRLAAQQQMEGLLAPHRPKEPAWFLATVGVSPDHQGKGLGSAVVLPGVEAAERAGVPAFLETSAPRNLPFYERLGFTVTADVEVPEGPRTWCMTRKPGA

SEQ ID NO: 3495 - protein, 967 aa, Artificial Sequence
  Synthetic Polypeptide
MALPVTALLLPLALLLHAARPDIQMTQTTSSLSASLGDRVTISCRASQDISKYLNWYQQKPDGTVKLLIYHTSRLHSGVPSRFSGSGSGTDYSLTISNLEQEDIATYFCQQGNTLPYTFGGGTKLEITGGGGSGGGGSGGGGSEVKLQESGPGLVAPSQSLSVTCTVSGVSLPDYGVSWIRQPPRKGLEWLGVIWGSETTYYNSALKSRLTIIKDNSKSQVFLKMNSLQTDDTAIYYCAKHYYYGGSYAMDYWGQGTSVTVSSRVEQKLISEEDLAKPTTTPAPRPPTPAPTIASQPLSLRPEACRPAAGGAVHTRGLDFACDIYIWAPLAGTCGVLLLSLVITLYCGRARVKFSRSADAPAYQQGQNQLYNELNLGRREEYDVLDKRRGRDPEMGGKPRRKNPQEGLYNELQKDKMAEAYSEIGMKGERRRGKGHDGLYQGLSTATKDTYDALHMQALPPRSRGSGATNFSLLKQAGDVEENPGPGIHMSDSKEVPSLPFLRHLLEELDSHEDSLLLFLCHDAAPGCTTVTQALCSLSQQRKLTLAALVEMLYVLQRMDLLKSRFGLSKEGAEQLLGTSFLTRYRKLMVCVGEELDSSELRALRLFACNLNPSLSTALSESSRFVELVLALENVGLVSPSSVSVLADMLRTLRRLDLCQQLVEYEQQEQARYRYCYAASPSLPVRTLRRGHGASEHEQLCMPVQESSDSPELLRTPVQESSSDSPEQTTLETDFYDYKDDDDKTSGSGEGRGSLLTCGDVEENPGPHMTEYKPTVRLATRDDVPRAVRTLAAAFADYPATRHTVDPDRHIERVTELQELFLTRVGLDIGKVWVADDGAAVAVWTTPESVEAGAVFAEIGPRMAELSGSRLAAQQQMEGLLAPHRPKEPAWFLATVGVSPDHQGKGLGSAVVLPGVEAAERAGVPAFLETSAPRNLPFYERLGFTVTADVEVPEGPRTWCMTRKPGA

SEQ ID NO: 3496 - protein, 1006 aa, Artificial Sequence
  Synthetic Polypeptide
MALPVTALLLPLALLLHAARPDIQMTQTTSSLSASLGDRVTISCRASQDISKYLNWYQQKPDGTVKLLIYHTSRLHSGVPSRFSGSGSGTDYSLTISNLEQEDIATYFCQQGNTLPYTFGGGTKLEITGGGGSGGGGSGGGGSEVKLQESGPGLVAPSQSLSVTCTVSGVSLPDYGVSWIRQPPRKGLEWLGVIWGSETTYYNSALKSRLTIIKDNSKSQVFLKMNSLQTDDTAIYYCAKHYYYGGSYAMDYWGQGTSVTVSSRVEQKLISEEDLAKPTTTPAPRPPTPAPTIASQPLSLRPEACRPAAGGAVHTRGLDFACDIYIWAPLAGTCGVLLLSLVITLYCKRGRKKLLYIFKQPFMRPVQTTQEEDGCSCRFPEEEEGGCELRVKFSRSADAPAYQQGQNQLYNELNLGRREEYDVLDKRRGRDPEMGGKPRRKNPQEGLYNELQKDKMAEAYSEIGMKGERRRGKGHDGLYQGLSTATKDTYDALHMQALPPRSRGSGATNFSLLKQAGDVEENPGPGIHMSDSKEVPSLPFLRHLLEELDSHEDSLLLFLCHDAAPGCTTVTQALCSLSQQRKLTLAALVEMLYVLQRMDLLKSRFGLSKEGAEQLLGTSFLTRYRKLMVCVGEELDSSELRALRLFACNLNPSLSTALSESSRFVELVLALENVGLVSPSSVSVLADMLRTLRRLDLCQQLVEYEQQEQARYRYCYAASPSLPVRTLRRGHGASEHEQLCMPVQESSDSPELLRTPVQESSSDSPEQTTLETDFYDYKDDDDKTSGSGEGRGSLLTCGDVEENPGPHMTEYKPTVRLATRDDVPRAVRTLAAAFADYPATRHTVDPDRHIERVTELQELFLTRVGLDIGKVWVADDGAAVAVWTTPESVEAGAVFAEIGPRMAELSGSRLAAQQQMEGLLAPHRPKEPAWFLATVGVSPDHQGKGLGSAVVLPGVEAAERAGVPAFLETSAPRNLPFYERLGFTVTADVEVPEGPRTWCMTRKPGA

SEQ ID NO: 3497 - protein, 1114 aa, Artificial Sequence
  Synthetic Polypeptide
MALPVTALLLPLALLLHAARPDIQMTQTTSSLSASLGDRVTISCRASQDISKYLNWYQQKPDGTVKLLIYHTSRLHSGVPSRFSGSGSGTDYSLTISNLEQEDIATYFCQQGNTLPYTFGGGTKLEITGGGGSGGGGSGGGGSEVKLQESGPGLVAPSQSLSVTCTVSGVSLPDYGVSWIRQPPRKGLEWLGVIWGSETTYYNSALKSRLTIIKDNSKSQVFLKMNSLQTDDTAIYYCAKHYYYGGSYAMDYWGQGTSVTVSSRVEQKLISEEDLAKPTTTPAPRPPTPAPTIASQPLSLRPEACRPAAGGAVHTRGLDFACDIYIWAPLAGTCGVLLLSLVITLYCKRGRKKLLYIFKQPFMRPVQTTQEEDGCSCRFPEEEEGGCELRVKFSRSADAPAYQQGQNQLYNELNLGRREEYDVLDKRRGRDPEMGGKPRRKNPQEGLYNELQKDKMAEAYSEIGMKGERRRGKGHDGLYQGLSTATKDTYDALHMQALPPRSRGSGATNFSLLKQAGDVEENPGPGIRDYKDDDDKAHFPGFGQSLLYGYPVYVFGDCVQADWCPVSGGLCSTRLHRHALLATCPEHQLTWDPIDGRVVSSPLQYLIPRLPSFPTQRTSRTLKVLTPPTTPVSPKVPPAFFQSMRKHTPYRNGCLEPTLGDQLPSLAFPEPGLRPQNIYTTWGKTVVCLYLYQLSPPMTWPLIPHVIFCHPRQLGAFLTKVPLKRLEELLYKMFLHTGAVIVLPEDDLPTTMFQPVRAPCIQTAWCTGLLPYHSILTTPGLIWTFNDGSPMISGPCPKAGQPSLVVQSSLLIFEKFQTKAFHPSYLLSHQLIQYSSFHNLHLLFDEYTNIPVSRSFNKGEADDNGDQPPEPAAQGESSTQKVRPSHTNNPKTSGSGEGRGSLLTCGDVEENPGPHMTEYKPTVRLATRDDVPRAVRTLAAAFADYPATRHTVDPDRHIERVTELQELFLTRVGLDIGKVWVADDGAAVAVWTTPESVEAGAVFAEIGPRMAELSGSRLAAQQQMEGLLAPHRPKEPAWFLATVGVSPDHQGKGLGSAVVLPGVEAAERAGVPAFLETSAPRNLPFYERLGFTVTADVEVPEGPRTWCMTRKPGA

SEQ ID NO: 3498 - protein, 962 aa, Artificial Sequence
  Synthetic Polypeptide
MALPVTALLLPLALLLHAARPDIQMTQTTSSLSASLGDRVTISCRASQDISKYLNWYQQKPDGTVKLLIYHTSRLHSGVPSRFSGSGSGTDYSLTISNLEQEDIATYFCQQGNTLPYTFGGGTKLEITGGGGSGGGGSGGGGSEVKLQESGPGLVAPSQSLSVTCTVSGVSLPDYGVSWIRQPPRKGLEWLGVIWGSETTYYNSALKSRLTIIKDNSKSQVFLKMNSLQTDDTAIYYCAKHYYYGGSYAMDYWGQGTSVTVSSRVEQKLISEEDLAKPTTTPAPRPPTPAPTIASQPLSLRPEACRPAAGGAVHTRGLDFACDIYIWAPLAGTCGVLLLSLVITLYCKRGRKKLLYIFKQPFMRPVQTTQEEDGCSCRFPEEEEGGCELRVKFSRSADAPAYQQGQNQLYNELNLGRREEYDVLDKRRGRDPEMGGKPRRKNPQEGLYNELQKDKMAEAYSEIGMKGERRRGKGHDGLYQGLSTATKDTYDALHMQALPPRSRGSGATNFSLLKQAGDVEENPGPGISTMSAEVIHQVEEALDTDEKEMLLFLCRDVAIDVVPPNVRDLLDILRERGKLSVGDLAELLYRVRRFDLLKRILKMDRKAVETHLLRNPHLVSDYRVLMAEIGEDLDKSDVSSLIFLMKDYMGRGKISKEKSFLDLVVELEKLNLVAPDQLDLLEKCLKNIHRIDLKTKIQKYKQSVQGAGTSYRNVLQAAIQKSLKDLETDFYDYKDDDDKTSGSGEGRGSLLTCGDVEENPGPHMTEYKPTVRLATRDDVPRAVRTLAAAFADYPATRHTVDPDRHIERVTELQELFLTRVGLDIGKVWVADDGAAVAVWTTPESVEAGAVFAEIGPRMAELSGSRLAAQQQMEGLLAPHRPKEPAWFLATVGVSPDHQGKGLGSAVVLPGVEAAERAGVPAFLETSAPRNLPFYERLGFTVTADVEVPEGPRTWCMTRKPGA

SEQ ID NO: 3499 - protein, 1246 aa, Artificial Sequence
  Synthetic Polypeptide
MALPVTALLLPLALLLHAARPDIQMTQTTSSLSASLGDRVTISCRASQDISKYLNWYQQKPDGTVKLLIYHTSRLHSGVPSRFSGSGSGTDYSLTISNLEQEDIATYFCQQGNTLPYTFGGGTKLEITGGGGSGGGGSGGGGSEVKLQESGPGLVAPSQSLSVTCTVSGVSLPDYGVSWIRQPPRKGLEWLGVIWGSETTYYNSALKSRLTIIKDNSKSQVFLKMNSLQTDDTAIYYCAKHYYYGGSYAMDYWGQGTSVTVSSRVEQKLISEEDLAKPTTTPAPRPPTPAPTIASQPLSLRPEACRPAAGGAVHTRGLDFACDIYIWAPLAGTCGVLLLSLVITLYCKRGRKKLLYIFKQPFMRPVQTTQEEDGCSCRFPEEEEGGCELRVKFSRSADAPAYQQGQNQLYNELNLGRREEYDVLDKRRGRDPEMGGKPRRKNPQEGLYNELQKDKMAEAYSEIGMKGERRRGKGHDGLYQGLSTATKDTYDALHMQALPPRSRGSGATNFSLLKQAGDVEENPGPGISTMSAEVIHQVEEALDTDEKEMLLFLCRDVAIDVVPPNVRDLLDILRERGKLSVGDLAELLYRVRRFDLLKRILKMDRKAVETHLLRNPHLVSDYRVLMAEIGEDLDKSDVSSLIFLMKDYMGRGKISKEKSFLDLVVELEKLNLVAPDQLDLLEKCLKNIHRIDLKTKIQKYKQSVQGAGTSYRNVLQAAIQKSLKDPSNNFRLHNGRSKEQRLKEQLGAQQEPVKKSIQESEAFLPQSIPEERYKMKSKPLGICLIIDCIGNETELLRDTFTSLGYEVQKFLHLSMHGISQILGQFACMPEHRDYDSFVCVLVSRGGSQSVYGVDQTHSGLPLHHIRRMFMGDSCPYLAGKPKMFFIQNYVVSEGQLEDSSLLEVDGPAMKNVEFKAQKRGLCTVHREADFFWSLCTADMSLLEQSHSSPSLYLQCLSQKLRQERKRPLLDLHIELNGYMYDWNSRVSAKEKYYVWLQHTLRKKLILSYTLETDFYDYKDDDDKTSGSGEGRGSLLTCGDVEENPGPHMTEYKPTVRLATRDDVPRAVRTLAAAFADYPATRHTVDPDRHIERVTELQELFLTRVGLDIGKVWVADDGAAVAVWTTPESVEAGAVFAEIGPRMAELSGSRLAAQQQMEGLLAPHRPKEPAWFLATVGVSPDHQGKGLGSAVVLPGVEAAERAGVPAFLETSAPRNLPFYERLGFTVTADVEVPEGPRTWCMTRKPGA

SEQ ID NO: 3500 - protein, 1066 aa, Artificial Sequence
  Synthetic Polypeptide
MALPVTALLLPLALLLHAARPDIQMTQTTSSLSASLGDRVTISCRASQDISKYLNWYQQKPDGTVKLLIYHTSRLHSGVPSRFSGSGSGTDYSLTISNLEQEDIATYFCQQGNTLPYTFGGGTKLEITGGGGSGGGGSGGGGSEVKLQESGPGLVAPSQSLSVTCTVSGVSLPDYGVSWIRQPPRKGLEWLGVIWGSETTYYNSALKSRLTIIKDNSKSQVFLKMNSLQTDDTAIYYCAKHYYYGGSYAMDYWGQGTSVTVSSRVEQKLISEEDLAKPTTTPAPRPPTPAPTIASQPLSLRPEACRPAAGGAVHTRGLDFACDIYIWAPLAGTCGVLLLSLVITLYCGRARVKFSRSADAPAYQQGQNQLYNELNLGRREEYDVLDKRRGRDPEMGGKPRRKNPQEGLYNELQKDKMAEAYSEIGMKGERRRGKGHDGLYQGLSTATKDTYDALHMQALPPRSRGSGATNFSLLKQAGDVEENPGPGITMTRGVQVETISPGDGRTFPKRGQTCVVHYTGMLEDGKKVDSSRDRNKPFKFMLGKQEVIRGWEEGVAQMSVGQRAKLTISPDYAYGATGHPGIIPPHATLVFDVELLKLEGIHMATYEVLCEVARKLGTDDREVVLFLLNVFIPQPTLAQLIGALRALKEEGRLTFPLLAECLFRAGRRDLLRDLLHLDPRFLERHLAGTMSYFSPYQLTVLHVDGELCARDIRSLIFLSKDTIGSRSTPQTFLHWVYCMENLDLLGPTDVDALMSMLRSLSRVDLQRQVQTLMGLHLSGPSHSQHYRHTPLETDFYDYKDDDDKTSGSGEGRGSLLTCGDVEENPGPMVSKGEELFTGVVPILVELDGDVNGHKFSVSGEGEGDATYGKLTLKFICTTGKLPVPWPTLVTTLTYGVQCFSRYPDHMKQHDFFKSAMPEGYVQERTIFFKDDGNYKTRAEVKFEGDTLVNRIELKGIDFKEDGNILGHKLEYNYNSHNVYIMADKQKNGIKVNFKIRHNIEDGSVQLADHYQQNTPIGDGPVLLPDNHYLSTQSALSKDPNEKRDHMVLLEFVTAAGITLGMDELYK

SEQ ID NO: 3501 - protein, 1173 aa, Artificial Sequence
  Synthetic Polypeptide
MALPVTALLLPLALLLHAARPDIQMTQTTSSLSASLGDRVTISCRASQDISKYLNWYQQKPDGTVKLLIYHTSRLHSGVPSRFSGSGSGTDYSLTISNLEQEDIATYFCQQGNTLPYTFGGGTKLEITGGGGSGGGGSGGGGSEVKLQESGPGLVAPSQSLSVTCTVSGVSLPDYGVSWIRQPPRKGLEWLGVIWGSETTYYNSALKSRLTIIKDNSKSQVFLKMNSLQTDDTAIYYCAKHYYYGGSYAMDYWGQGTSVTVSSRVEQKLISEEDLAKPTTTPAPRPPTPAPTIASQPLSLRPEACRPAAGGAVHTRGLDFACDIYIWAPLAGTCGVLLLSLVITLYCGRARVKFSRSADAPAYQQGQNQLYNELNLGRREEYDVLDKRRGRDPEMGGKPRRKNPQEGLYNELQKDKMAEAYSEIGMKGERRRGKGHDGLYQGLSTATKDTYDALHMQALPPRSRGSGATNFSLLKQAGDVEENPGPGITMGVQVETISPGDGRTFPKRGQTCVVHYTGMLEDGKKVDSSRDRNKPFKFMLGKQEVIRGWEEGVAQMSVGQRAKLTISPDYAYGATGHPGIIPPHATLVFDVELLKLGTRGVQVETISPGDGRTFPKRGQTCVVHYTGMLEDGKKVDSSRDRNKPFKFMLGKQEVIRGWEEGVAQMSVGQRAKLTISPDYAYGATGHPGIIPPHATLVFDVELLKLEGIHMATYEVLCEVARKLGTDDREVVLFLLNVFIPQPTLAQLIGALRALKEEGRLTFPLLAECLFRAGRRDLLRDLLHLDPRFLERHLAGTMSYFSPYQLTVLHVDGELCARDIRSLIFLSKDTIGSRSTPQTFLHWVYCMENLDLLGPTDVDALMSMLRSLSRVDLQRQVQTLMGLHLSGPSHSQHYRHTPLETDFYDYKDDDDKTSGSGEGRGSLLTCGDVEENPGPMVSKGEELFTGVVPILVELDGDVNGHKFSVSGEGEGDATYGKLTLKFICTTGKLPVPWPTLVTTLTYGVQCFSRYPDHMKQHDFFKSAMPEGYVQERTIFFKDDGNYKTRAEVKFEGDTLVNRIELKGIDFKEDGNILGHKLEYNYNSHNVYIMADKQKNGIKVNFKIRHNIEDGSVQLADHYQQNTPIGDGPVLLPDNHYLSTQSALSKDPNEKRDHMVLLEFVTAAGITLGMDELYK

SEQ ID NO: 3502 - protein, 1184 aa, Artificial Sequence
  Synthetic Polypeptide
MALPVTALLLPLALLLHAARPDIQMTQTTSSLSASLGDRVTISCRASQDISKYLNWYQQKPDGTVKLLIYHTSRLHSGVPSRFSGSGSGTDYSLTISNLEQEDIATYFCQQGNTLPYTFGGGTKLEITGGGGSGGGGSGGGGSEVKLQESGPGLVAPSQSLSVTCTVSGVSLPDYGVSWIRQPPRKGLEWLGVIWGSETTYYNSALKSRLTIIKDNSKSQVFLKMNSLQTDDTAIYYCAKHYYYGGSYAMDYWGQGTSVTVSSRVEQKLISEEDLAKPTTTPAPRPPTPAPTIASQPLSLRPEACRPAAGGAVHTRGLDFACDIYIWAPLAGTCGVLLLSLVITLYCGRARVKFSRSADAPAYQQGQNQLYNELNLGRREEYDVLDKRRGRDPEMGGKPRRKNPQEGLYNELQKDKMAEAYSEIGMKGERRRGKGHDGLYQGLSTATKDTYDALHMQALPPRSRGSGATNFSLLKQAGDVEENPGPGITMGSSKSKPKDPSQRGVQVETISPGDGRTFPKRGQTCVVHYTGMLEDGKKVDSSRDRNKPFKFMLGKQEVIRGWEEGVAQMSVGQRAKLTISPDYAYGATGHPGIIPPHATLVFDVELLKLGTRGVQVETISPGDGRTFPKRGQTCVVHYTGMLEDGKKVDSSRDRNKPFKFMLGKQEVIRGWEEGVAQMSVGQRAKLTISPDYAYGATGHPGIIPPHATLVFDVELLKLETSATYEVLCEVARKLGTDDREVVLFLLNVFIPQPTLAQLIGALRALKEEGRLTFPLLAECLFRAGRRDLLRDLLHLDPRFLERHLAGTMSYFSPYQLTVLHVDGELCARDIRSLIFLSKDTIGSRSTPQTFLHWVYCMENLDLLGPTDVDALMSMLRSLSRVDLQRQVQTLMGLHLSGPSHSQHYRHTPLETDFYDYKDDDDKTSGSGEGRGSLLTCGDVEENPGPMVSKGEELFTGVVPILVELDGDVNGHKFSVSGEGEGDATYGKLTLKFICTTGKLPVPWPTLVTTLTYGVQCFSRYPDHMKQHDFFKSAMPEGYVQERTIFFKDDGNYKTRAEVKFEGDTLVNRIELKGIDFKEDGNILGHKLEYNYNSHNVYIMADKQKNGIKVNFKIRHNIEDGSVQLADHYQQNTPIGDGPVLLPDNHYLSTQSALSKDPNEKRDHMVLLEFVTAAGITLGMDELYK

SEQ ID NO: 3503 - protein, 947 aa, Artificial Sequence
  Synthetic Polypeptide
MALPVTALLLPLALLLHAARPDIQMTQTTSSLSASLGDRVTISCRASQDISKYLNWYQQKPDGTVKLLIYHTSRLHSGVPSRFSGSGSGTDYSLTISNLEQEDIATYFCQQGNTLPYTFGGGTKLEITGGGGSGGGGSGGGGSEVKLQESGPGLVAPSQSLSVTCTVSGVSLPDYGVSWIRQPPRKGLEWLGVIWGSETTYYNSALKSRLTIIKDNSKSQVFLKMNSLQTDDTAIYYCAKHYYYGGSYAMDYWGQGTSVTVSSRVEQKLISEEDLKIEVMYPPPYLDNEKSNGTIIHVKGKHLCPSPLFPGPSKPFWVLVVVGGVLACYSLLVTVAFIIFWVRSKRSRLLHSDYMNMTPRRPGPTRKHYQPYAPPRDFAAYRSRVKFSRSADAPAYQQGQNQLYNELNLGRREEYDVLDKRRGRDPEMGGKPRRKNPQEGLYNELQKDKMAEAYSEIGMKGERRRGKGHDGLYQGLSTATKDTYDALHMQALPPRSRGSGATNFSLLKQAGDVEENPGPGIHMATYEVLCEVARKLGTDDREVVLFLLNVFIPQPTLAQLIGALRALKEEGRLTFPLLAECLFRAGRRDLLRDLLHLDPRFLERHLAGTMSYFSPYQLTVLHVDGELCARDIRSLIFLSKDTIGSRSTPQTFLHWVYCMENLDLLGPTDVDALMSMLRSLSRVDLQRQVQTLMGLHLSGPSHSQHYRHTPLETDFYDYKDDDDKTSGSGEGRGSLLTCGDVEENPGPHMTEYKPTVRLATRDDVPRAVRTLAAAFADYPATRHTVDPDRHIERVTELQELFLTRVGLDIGKVWVADDGAAVAVWTTPESVEAGAVFAEIGPRMAELSGSRLAAQQQMEGLLAPHRPKEPAWFLATVGVSPDHQGKGLGSAVVLPGVEAAERAGVPAFLETSAPRNLPFYERLGFTVTADVEVPEGPRTWCMTRKPGA

SEQ ID NO: 3504 - protein, 1366 aa, Artificial Sequence
  Synthetic Polypeptide
MALPVTALLLPLALLLHAARPDIQMTQTTSSLSASLGDRVTISCRASQDISKYLNWYQQKPDGTVKLLIYHTSRLHSGVPSRFSGSGSGTDYSLTISNLEQEDIATYFCQQGNTLPYTFGGGTKLEITGGGGSGGGGSGGGGSEVKLQESGPGLVAPSQSLSVTCTVSGVSLPDYGVSWIRQPPRKGLEWLGVIWGSETTYYNSALKSRLTIIKDNSKSQVFLKMNSLQTDDTAIYYCAKHYYYGGSYAMDYWGQGTSVTVSSRVEQKLISEEDLAKPTTTPAPRPPTPAPTIASQPLSLRPEACRPAAGGAVHTRGLDFACDIYIWAPLAGTCGVLLLSLVITLYCKRGRKKLLYIFKQPFMRPVQTTQEEDGCSCRFPEEEEGGCELRVKFSRSADAPAYQQGQNQLYNELNLGRREEYDVLDKRRGRDPEMGGKPRRKNPQEGLYNELQKDKMAEAYSEIGMKGERRRGKGHDGLYQGLSTATKDTYDALHMQALPPRSRGSGATNFSLLKQAGDVEENPGPGITMGVQVETISPGDGRTFPKRGQTCVVHYTGMLEDGKKVDSSRDRNKPFKFMLGKQEVIRGWEEGVAQMSVGQRAKLTISPDYAYGATGHPGIIPPHATLVFDVELLKLGTRGVQVETISPGDGRTFPKRGQTCVVHYTGMLEDGKKVDSSRDRNKPFKFMLGKQEVIRGWEEGVAQMSVGQRAKLTISPDYAYGATGHPGIIPPHATLVFDVELLKLEGIHMAHFPGFGQSLLYGYPVYVFGDCVQADWCPVSGGLCSTRLHRHALLATCPEHQLTWDPIDGRVVSSPLQYLIPRLPSFPTQRTSRTLKVLTPPTTPVSPKVPPAFFQSMRKHTPYRNGCLEPTLGDQLPSLAFPEPGLRPQNIYTTWGKTVVCLYLYQLSPPMTWPLIPHVIFCHPRQLGAFLTKVPLKRLEELLYKMFLHTGAVIVLPEDDLPTTMFQPVRAPCIQTAWCTGLLPYHSILTTPGLIWTFNDGSPMISGPCPKAGQPSLVVQSSLLIFEKFQTKAFHPSYLLSHQLIQYSSFHNLHLLFDEYTNIPVSRSFNKGEADDNGDQPPEPAAQGESSTQKVRPSHTNNPKTSGSGEGRGSLLTCGDVEENPGPMVSKGEELFTGVVPILVELDGDVNGHKFSVSGEGEGDATYGKLTLKFICTTGKLPVPWPTLVTTLTYGVQCFSRYPDHMKQHDFFKSAMPEGYVQERTIFFKDDGNYKTRAEVKFEGDTLVNRIELKGIDFKEDGNILGHKLEYNYNSHNVYIMADKQKNGIKVNFKIRHNIEDGSVQLADHYQQNTPIGDGPVLLPDNHYLSTQSALSKDPNEKRDHMVLLEFVTAAGITLGMDELYK

SEQ ID NO: 3505 - protein, 1130 aa, Artificial Sequence
  Synthetic Polypeptide
MALPVTALLLPLALLLHAARPDIQMTQTTSSLSASLGDRVTISCRASQDISKYLNWYQQKPDGTVKLLIYHTSRLHSGVPSRFSGSGSGTDYSLTISNLEQEDIATYFCQQGNTLPYTFGGGTKLEITGGGGSGGGGSGGGGSEVKLQESGPGLVAPSQSLSVTCTVSGVSLPDYGVSWIRQPPRKGLEWLGVIWGSETTYYNSALKSRLTIIKDNSKSQVFLKMNSLQTDDTAIYYCAKHYYYGGSYAMDYWGQGTSVTVSSRVEQKLISEEDLKIEVMYPPPYLDNEKSNGTIIHVKGKHLCPSPLFPGPSKPFWVLVVVGGVLACYSLLVTVAFIIFWVRSKRSRLLHSDYMNMTPRRPGPTRKHYQPYAPPRDFAAYRSRVKFSRSADAPAYQQGQNQLYNELNLGRREEYDVLDKRRGRDPEMGGKPRRKNPQEGLYNELQKDKMAEAYSEIGMKGERRRGKGHDGLYQGLSTATKDTYDALHMQALPPRSRGSGATNFSLLKQAGDVEENPGPGIHMAHEPIPFSFLRNLLAELDASEHEVLRFLCRDVAPASKTAEDALRALQRRRLLTLSSMAELLCALRRFDVLKVRFGMTRECAGRLLGHGFLSQYRLQVAAINNMVGSEDLRVMCLCAGKLLPPSCTPRCLVDLVSALEDAGAISPQDVSVLVTLLHAVCRYDLSVALSAVAHGHMTVGVGTPVQDEPMDVLEVDDAEPMEATPACDEIGVVKLAGAASAGAPLADGAFAACTSAGKGEDLATSDLTDSEPEDSVFAVADPVYADVDLSMFVRANATADSSMFVNADAGADSSLVNADAGADSSLVNADAGADSSLVNAVADANSSLMRTTSACTDSEPEDSAGPSCAGMALSMFGRAKSVSSLLLRTKASYLETDFYDYKDDDDKTSGSGEGRGSLLTCGDVEENPGPHMTEYKPTVRLATRDDVPRAVRTLAAAFADYPATRHTVDPDRHIERVTELQELFLTRVGLDIGKVWVADDGAAVAVWTTPESVEAGAVFAEIGPRMAELSGSRLAAQQQMEGLLAPHRPKEPAWFLATVGVSPDHQGKGLGSAVVLPGVEAAERAGVPAFLETSAPRNLPFYERLGFTVTADVEVPEGPRTWCMTRKPGA

SEQ ID NO: 3506 - protein, 986 aa, Artificial Sequence
  Synthetic Polypeptide
MALPVTALLLPLALLLHAARPDIQMTQTTSSLSASLGDRVTISCRASQDISKYLNWYQQKPDGTVKLLIYHTSRLHSGVPSRFSGSGSGTDYSLTISNLEQEDIATYFCQQGNTLPYTFGGGTKLEITGGGGSGGGGSGGGGSEVKLQESGPGLVAPSQSLSVTCTVSGVSLPDYGVSWIRQPPRKGLEWLGVIWGSETTYYNSALKSRLTIIKDNSKSQVFLKMNSLQTDDTAIYYCAKHYYYGGSYAMDYWGQGTSVTVSSRVEQKLISEEDLKIEVMYPPPYLDNEKSNGTIIHVKGKHLCPSPLFPGPSKPFWVLVVVGGVLACYSLLVTVAFIIFWVRSKRSRLLHSDYMNMTPRRPGPTRKHYQPYAPPRDFAAYRSRVKFSRSADAPAYQQGQNQLYNELNLGRREEYDVLDKRRGRDPEMGGKPRRKNPQEGLYNELQKDKMAEAYSEIGMKGERRRGKGHDGLYQGLSTATKDTYDALHMQALPPRSRGSGATNFSLLKQAGDVEENPGPGIHMATYEVLCEVARKLGTDDREVVLFLLNVFIPQPTLAQLIGALRALKEEGRLTFPLLAECLFRAGRRDLLRDLLHLDPRFLERHLAGTMSYFSPYQLTVLHVDGELCARDIRSLIFLSKDTIGSRSTPQTFLHWVYCMENLDLLGPTDVDALMSMLRSLSRVDLQRQVQTLMGLHLSGPSHSQHYRHTPLETDFYDYKDDDDKTSGSGEGRGSLLTCGDVEENPGPMVSKGEELFTGVVPILVELDGDVNGHKFSVSGEGEGDATYGKLTLKFICTTGKLPVPWPTLVTTLTYGVQCFSRYPDHMKQHDFFKSAMPEGYVQERTIFFKDDGNYKTRAEVKFEGDTLVNRIELKGIDFKEDGNILGHKLEYNYNSHNVYIMADKQKNGIKVNFKIRHNIEDGSVQLADHYQQNTPIGDGPVLLPDNHYLSTQSALSKDPNEKRDHMVLLEFVTAAGITLGMDELYK

SEQ ID NO: 3507 - protein, 1024 aa, Artificial Sequence
  Synthetic Polypeptide
MALPVTALLLPLALLLHAARPDIQMTQTTSSLSASLGDRVTISCRASQDISKYLNWYQQKPDGTVKLLIYHTSRLHSGVPSRFSGSGSGTDYSLTISNLEQEDIATYFCQQGNTLPYTFGGGTKLEITGGGGSGGGGSGGGGSEVKLQESGPGLVAPSQSLSVTCTVSGVSLPDYGVSWIRQPPRKGLEWLGVIWGSETTYYNSALKSRLTIIKDNSKSQVFLKMNSLQTDDTAIYYCAKHYYYGGSYAMDYWGQGTSVTVSSRVEQKLISEEDLAKPTTTPAPRPPTPAPTIASQPLSLRPEACRPAAGGAVHTRGLDFACDIYIWAPLAGTCGVLLLSLVITLYCKRGRKKLLYIFKQPFMRPVQTTQEEDGCSCRFPEEEEGGCELRVKFSRSADAPAYQQGQNQLYNELNLGRREEYDVLDKRRGRDPEMGGKPRRKNPQEGLYNELQKDKMAEAYSEIGMKGERRRGKGHDGLYQGLSTATKDTYDALHMQALPPRSRGSGATNFSLLKQAGDVEENPGPGILMDWIWRILFLVGAATGAHSEIVLTQSPATLSLSPGERATLSCSASISVSYMYWYQQKPGQAPRLLIYDMSNLASGIPARFSGSGSGTDFTLTISSLEPEDFAVYYCMQWSGYPYTFGGGTKVEIKGGGGSGGGGSGGGGSEVQLVESGGGLVQPGGSLRLSCAASGFTFSPFAMSWVRQAPGKGLEWVAKISPGGSWTYYSDTVTGRFTISRDNAKNSLYLQMNSLRAEDTAVYYCARQLWGYYALDIWGQGTTVTVSSLETDFYDYKDDDDKTSGSGEGRGSLLTCGDVEENPGPHMTEYKPTVRLATRDDVPRAVRTLAAAFADYPATRHTVDPDRHIERVTELQELFLTRVGLDIGKVWVADDGAAVAVWTTPESVEAGAVFAEIGPRMAELSGSRLAAQQQMEGLLAPHRPKEPAWFLATVGVSPDHQGKGLGSAVVLPGVEAAERAGVPAFLETSAPRNLPFYERLGFTVTADVEVPEGPRTWCMTRKPGA

SEQ ID NO: 3508 - protein, 1025 aa, Artificial Sequence
  Synthetic Polypeptide
MALPVTALLLPLALLLHAARPDIQMTQTTSSLSASLGDRVTISCRASQDISKYLNWYQQKPDGTVKLLIYHTSRLHSGVPSRFSGSGSGTDYSLTISNLEQEDIATYFCQQGNTLPYTFGGGTKLEITGGGGSGGGGSGGGGSEVKLQESGPGLVAPSQSLSVTCTVSGVSLPDYGVSWIRQPPRKGLEWLGVIWGSETTYYNSALKSRLTIIKDNSKSQVFLKMNSLQTDDTAIYYCAKHYYYGGSYAMDYWGQGTSVTVSSRVEQKLISEEDLAKPTTTPAPRPPTPAPTIASQPLSLRPEACRPAAGGAVHTRGLDFACDIYIWAPLAGTCGVLLLSLVITLYCKRGRKKLLYIFKQPFMRPVQTTQEEDGCSCRFPEEEEGGCELRVKFSRSADAPAYQQGQNQLYNELNLGRREEYDVLDKRRGRDPEMGGKPRRKNPQEGLYNELQKDKMAEAYSEIGMKGERRRGKGHDGLYQGLSTATKDTYDALHMQALPPRSRGSGATNFSLLKQAGDVEENPGPGILMDWIWRILFLVGAATGAHSQVQLQESGPGLVKPSETLSLTCAVSGYSISDDHAVSWVRQPPGEGLEWIGFISYSGITNYNPTLQDRVTISRDNSKNTLYLQMNSLRAEDTAVYYCARLLARATAMDVWGEGTLVTVSSGGGGSGGGGSGGGGSDIQMTQSPSSLSASVGDSVTITCQASQDISSYLNWYQQKPGKAPELLIYYGSELESGVPSRFSGSGSGTDFTFTISSLEAEDAATYYCGQGNRLPYTFGQGTKVEIELETDFYDYKDDDDKTSGSGEGRGSLLTCGDVEENPGPHMTEYKPTVRLATRDDVPRAVRTLAAAFADYPATRHTVDPDRHIERVTELQELFLTRVGLDIGKVWVADDGAAVAVWTTPESVEAGAVFAEIGPRMAELSGSRLAAQQQMEGLLAPHRPKEPAWFLATVGVSPDHQGKGLGSAVVLPGVEAAERAGVPAFLETSAPRNLPFYERLGFTVTADVEVPEGPRTWCMTRKPGA

SEQ ID NO: 3509 - protein, 817 aa, Artificial Sequence
  Synthetic Polypeptide
MALPVTALLLPLALLLHAARPDIQMTQTTSSLSASLGDRVTISCRASQDISKYLNWYQQKPDGTVKLLIYHTSRLHSGVPSRFSGSGSGTDYSLTISNLEQEDIATYFCQQGNTLPYTFGGGTKLEITGGGGSGGGGSGGGGSEVKLQESGPGLVAPSQSLSVTCTVSGVSLPDYGVSWIRQPPRKGLEWLGVIWGSETTYYNSALKSRLTIIKDNSKSQVFLKMNSLQTDDTAIYYCAKHYYYGGSYAMDYWGQGTSVTVSSRVEQKLISEEDLAKPTTTPAPRPPTPAPTIASQPLSLRPEACRPAAGGAVHTRGLDFACDIYIWAPLAGTCGVLLLSLVITLYCKRGRKKLLYIFKQPFMRPVQTTQEEDGCSCRFPEEEEGGCELRVKFSRSADAPAYQQGQNQLYNELNLGRREEYDVLDKRRGRDPEMGGKPRRKNPQEGLYNELQKDKMAEAYSEIGMKGERRRGKGHDGLYQGLSTATKDTYDALHMQALPPRSRGSGATNFSLLKQAGDVEENPGPGILTMDWIWRILFLVGAATGAHSGHRPLDKKREEAPSLRPAPPPISGGGYRSGGSLETDFYDYKDDDDKTSGSGEGRGSLLTCGDVEENPGPHMTEYKPTVRLATRDDVPRAVRTLAAAFADYPATRHTVDPDRHIERVTELQELFLTRVGLDIGKVWVADDGAAVAVWTTPESVEAGAVFAEIGPRMAELSGSRLAAQQQMEGLLAPHRPKEPAWFLATVGVSPDHQGKGLGSAVVLPGVEAAERAGVPAFLETSAPRNLPFYERLGFTVTADVEVPEGPRTWCMTRKPGA

SEQ ID NO: 3510 - protein, 1120 aa, Artificial Sequence
  Synthetic Polypeptide
MALPVTALLLPLALLLHAARPDIQMTQTTSSLSASLGDRVTISCRASQDISKYLNWYQQKPDGTVKLLIYHTSRLHSGVPSRFSGSGSGTDYSLTISNLEQEDIATYFCQQGNTLPYTFGGGTKLEITGGGGSGGGGSGGGGSEVKLQESGPGLVAPSQSLSVTCTVSGVSLPDYGVSWIRQPPRKGLEWLGVIWGSETTYYNSALKSRLTIIKDNSKSQVFLKMNSLQTDDTAIYYCAKHYYYGGSYAMDYWGQGTSVTVSSRVEQKLISEEDLAKPTTTPAPRPPTPAPTIASQPLSLRPEACRPAAGGAVHTRGLDFACDIYIWAPLAGTCGVLLLSLVITLYCKRGRKKLLYIFKQPFMRPVQTTQEEDGCSCRFPEEEEGGCELRVKFSRSADAPAYQQGQNQLYNELNLGRREEYDVLDKRRGRDPEMGGKPRRKNPQEGLYNELQKDKMAEAYSEIGMKGERRRGKGHDGLYQGLSTATKDTYDALHMQALPPRSRGSGATNFSLLKQAGDVEENPGPGIRAHFPGFGQSLLYGYPVYVFGDCVQADWCPVSGGLCSTRLHRHALLATCPEHQLTWDPIDGRVVSSPLQYLIPRLPSFPTQRTSRTLKVLTPPTTPVSPKVPPAFFQSMRKHTPYRNGCLEPTLGDQLPSLAFPEPGLRPQNIYTTWGKTVVCLYLYQLSPPMTWPLIPHVIFCHPRQLGAFLTKVPLKRLEELLYKMFLHTGAVIVLPEDDLPTTMFQPVRAPCIQTAWCTGLLPYHSILTTPGLIWTFNDGSPMISGPCPKAGQPSLVVQSSLLIFEKFQTKAFHPSYLLSHQLIQYSSFHNLHLLFDEYTNIPVSILFNKGEADDNGDQPPEPAAQGESSTQKVRPSHTNNPKLETDFYDYKDDDDKTSGSGEGRGSLLTCGDVEENPGPHMTEYKPTVRLATRDDVPRAVRTLAAAFADYPATRHTVDPDRHIERVTELQELFLTRVGLDIGKVWVADDGAAVAVWTTPESVEAGAVFAEIGPRMAELSGSRLAAQQQMEGLLAPHRPKEPAWFLATVGVSPDHQGKGLGSAVVLPGVEAAERAGVPAFLETSAPRNLPFYERLGFTVTADVEVPEGPRTWCMTRKPGA

SEQ ID NO: 3511 - protein, 1107 aa, Artificial Sequence; identical to SEQ ID NO: 3488
  Synthetic Polypeptide

SEQ ID NO: 3512 - protein, 1075 aa, Artificial Sequence
  Synthetic Polypeptide
MALPVTALLLPLALLLHAARPDIQMTQTTSSLSASLGDRVTISCRASQDISKYLNWYQQKPDGTVKLLIYHTSRLHSGVPSRFSGSGSGTDYSLTISNLEQEDIATYFCQQGNTLPYTFGGGTKLEITGGGGSGGGGSGGGGSEVKLQESGPGLVAPSQSLSVTCTVSGVSLPDYGVSWIRQPPRKGLEWLGVIWGSETTYYNSALKSRLTIIKDNSKSQVFLKMNSLQTDDTAIYYCAKHYYYGGSYAMDYWGQGTSVTVSSRVEQKLISEEDLAKPTTTPAPRPPTPAPTIASQPLSLRPEACRPAAGGAVHTRGLDFACDIYIWAPLAGTCGVLLLSLVITLYCGRARVKFSRSADAPAYQQGQNQLYNELNLGRREEYDVLDKRRGRDPEMGGKPRRKNPQEGLYNELQKDKMAEAYSEIGMKGERRRGKGHDGLYQGLSTATKDTYDALHMQALPPRSRGSGATNFSLLKQAGDVEENPGPGIRDYKDDDDKAHFPGFGQSLLYGYPVYVFGDCVQADWCPVSGGLCSTRLHRHALLATCPEHQLTWDPIDGRVVSSPLQYLIPRLPSFPTQRTSRTLKVLTPPTTPVSPKVPPAFFQSMRKHTPYRNGCLEPTLGDQLPSLAFPEPGLRPQNIYTTWGKTVVCLYLYQLSPPMTWPLIPHVIFCHPRQLGAFLTKVPLKRLEELLYKMFLHTGAVIVLPEDDLPTTMFQPVRAPCIQTAWCTGLLPYHSILTTPGLIWTFNDGSPMISGPCPKAGQPSLVVQSSLLIFEKFQTKAFHPSYLLSHQLIQYSSFHNLHLLFDEYTNIPVSRSFNKGEADDNGDQPPEPAAQGESSTQKVRPSHTNNPKTSGSGEGRGSLLTCGDVEENPGPHMTEYKPTVRLATRDDVPRAVRTLAAAFADYPATRHTVDPDRHIERVTELQELFLTRVGLDIGKVWVADDGAAVAVWTTPESVEAGAVFAEIGPRMAELSGSRLAAQQQMEGLLAPHRPKEPAWFLATVGVSPDHQGKGLGSAVVLPGVEAAERAGVPAFLETSAPRNLPFYERLGFTVTADVEVPEGPRTWCMTRKPGA

SEQ ID NO: 3513 - protein, 1107 aa, Artificial Sequence
  Synthetic Polypeptide
MALPVTALLLPLALLLHAARPDIQMTQTTSSLSASLGDRVTISCRASQDISKYLNWYQQKPDGTVKLLIYHTSRLHSGVPSRFSGSGSGTDYSLTISNLEQEDIATYFCQQGNTLPYTFGGGTKLEITGGGGSGGGGSGGGGSEVKLQESGPGLVAPSQSLSVTCTVSGVSLPDYGVSWIRQPPRKGLEWLGVIWGSETTYYNSALKSRLTIIKDNSKSQVFLKMNSLQTDDTAIYYCAKHYYYGGSYAMDYWGQGTSVTVSSRVEQKLISEEDLAKPTTTPAPRPPTPAPTIASQPLSLRPEACRPAAGGAVHTRGLDFACDIYIWAPLAGTCGVLLLSLVITLYCKRGRKKLLYIFKQPFMRPVQTTQEEDGCSCRFPEEEEGGCELRVKFSRSADAPAYQQGQNQLYNELNLGRREEYDVLDKRRGRDPEMGGKPRRKNPQEGLYNELQKDKMAEAYSEIGMKGERRRGKGHDGLYQGLSTATKDTYDALHMQALPPRSRGSGATNFSLLKQAGDVEENPGPGIRMAHFPGFGQSLLYGYPVYVFGDCVQADWCPVSGGLCSTRLHRHALLATCPEHQLTWDPIDGRVVSSPLQYLIPRLPSFPTQRTSRTLKVLTPPTTPVSPKVPPAFFQSMRKHTPYRNGCLEPTLGDQLPSLAFPEPGLRPQNIYTTWGKTVVCLYLYQLSPPMTWPLIPHVIFCHPRQLGAFLTKVPLKRLEELLYKMFLHTGAVIVLPEDDLPTTMFQPVRAPCIQTAWCTGLLPYHSILTTPGLIWTFNDGSPMISGPCPKAGQPSLVVQSSLLIFEKFQTKAFHPSYLLSHQLIQYSSFHNLHLLFDEYTNIPVSILFNKGEADDNGDQPPEPAAQGESSTQKVRPSHTNNPKTSGSGEGRGSLLTCGDVEENPGPHMTEYKPTVRLATRDDVPRAVRTLAAAFADYPATRHTVDPDRHIERVTELQELFLTRVGLDIGKVWVADDGAAVAVWTTPESVEAGAVFAEIGPRMAELSGSRLAAQQQMEGLLAPHRPKEPAWFLATVGVSPDHQGKGLGSAVVLPGVEAAERAGVPAFLETSAPRNLPFYERLGFTVTADVEVPEGPRTWCMTRKPGA

SEQ ID NO: 3514 - protein, 718 aa, Artificial Sequence
  Synthetic Polypeptide
MALPVTALLLPLALLLHAARPDIQMTQTTSSLSASLGDRVTISCRASQDISKYLNWYQQKPDGTVKLLIYHTSRLHSGVPSRFSGSGSGTDYSLTISNLEQEDIATYFCQQGNTLPYTFGGGTKLEITGGGGSGGGGSGGGGSEVKLQESGPGLVAPSQSLSVTCTVSGVSLPDYGVSWIRQPPRKGLEWLGVIWGSETTYYNSALKSRLTIIKDNSKSQVFLKMNSLQTDDTAIYYCAKHYYYGGSYAMDYWGQGTSVTVSSRVEQKLISEEDLKIEVMYPPPYLDNEKSNGTIIHVKGKHLCPSPLFPGPSKPFWVLVVVGGVLACYSLLVTVAFIIFWVRSKRSRLLHSDYMNMTPRRPGPTRKHYQPYAPPRDFAAYRSRVKFSRSADAPAYQQGQNQLYNELNLGRREEYDVLDKRRGRDPEMGGKPRRKNPQEGLYNELQKDKMAEAYSEIGMKGERRRGKGHDGLYQGLSTATKDTYDALHMQALPPRSSGSGEGRGSLLTCGDVEENPGPHMTEYKPTVRLATRDDVPRAVRTLAAAFADYPATRHTVDPDRHIERVTELQELFLTRVGLDIGKVWVADDGAAVAVWTTPESVEAGAVFAEIGPRMAELSGSRLAAQQQMEGLLAPHRPKEPAWFLATVGVSPDHQGKGLGSAVVLPGVEAAERAGVPAFLETSAPRNLPFYERLGFTVTADVEVPEGPRTWCMTRKPGA

SEQ ID NO: 3515 - protein, 1027 aa, Artificial Sequence
  Synthetic Polypeptide
MALPVTALLLPLALLLHAARPDIQMTQTTSSLSASLGDRVTISCRASQDISKYLNWYQQKPDGTVKLLIYHTSRLHSGVPSRFSGSGSGTDYSLTISNLEQEDIATYFCQQGNTLPYTFGGGTKLEITGGGGSGGGGSGGGGSEVKLQESGPGLVAPSQSLSVTCTVSGVSLPDYGVSWIRQPPRKGLEWLGVIWGSETTYYNSALKSRLTIIKDNSKSQVFLKMNSLQTDDTAIYYCAKHYYYGGSYAMDYWGQGTSVTVSSRVEQKLISEEDLAKPTTTPAPRPPTPAPTIASQPLSLRPEACRPAAGGAVHTRGLDFACDIYIWAPLAGTCGVLLLSLVITLYCGRARVKFSRSADAPAYQQGQNQLYNELNLGRREEYDVLDKRRGRDPEMGGKPRRKNPQEGLYNELQKDKMAEAYSEIGMKGERRRGKGHDGLYQGLSTATKDTYDALHMQALPPRSRGSGATNFSLLKQAGDVEENPGPGIHMTRGVQVETISPGDGRTFPKRGQTCVVHYTGMLEDGKKVDSSRDRNKPFKFMLGKQEVIRGWEEGVAQMSVGQRAKLTISPDYAYGATGHPGIIPPHATLVFDVELLKLEGIHMATYEVLCEVARKLGTDDREVVLFLLNVFIPQPTLAQLIGALRALKEEGRLTFPLLAECLFRAGRRDLLRDLLHLDPRFLERHLAGTMSYFSPYQLTVLHVDGELCARDIRSLIFLSKDTIGSRSTPQTFLHWVYCMENLDLLGPTDVDALMSMLRSLSRVDLQRQVQTLMGLHLSGPSHSQHYRHTPLETDFYDYKDDDDKTSGSGEGRGSLLTCGDVEENPGPHMTEYKPTVRLATRDDVPRAVRTLAAAFADYPATRHTVDPDRHIERVTELQELFLTRVGLDIGKVWVADDGAAVAVWTTPESVEAGAVFAEIGPRMAELSGSRLAAQQQMEGLLAPHRPKEPAWFLATVGVSPDHQGKGLGSAVVLPGVEAAERAGVPAFLETSAPRNLPFYERLGFTVTADVEVPEGPRTWCMTRKPGA

SEQ ID NO: 3516 - protein, 719 aa, Artificial Sequence
  Synthetic Polypeptide
MALPVTALLLPLALLLHAARPDDIVLTQSPASLAVSLGQSVTISCRASESVEYYGTSLMQWYQQKPGQPPKLLIYATSNVESGVPARFSGSGSGTDFSLNIHPVEEDDIAMYFCQQSRKLPSTFGGGTKLEIKGGGGSGGGGSGGGGSDVRLQESGPGQVKPSQTVSLTCSVTGYSITNGNHWWNWIRQVSGSKLEWIGYISSSGSTDSNPSLKSRISITRDTSKNQLFLQLNSVTTEDIATYYCARGYYFDYWGQGTTLTVSSTREQKLISEEDLKIEVMYPPPYLDNEKSNGTIIHVKGKHLCPSPLFPGPSKPFWVLVVVGGVLACYSLLVTVAFIIFWVRSKRSRLLHSDYMNMTPRRPGPTRKHYQPYAPPRDFAAYRSRVKFSRSADAPAYQQGQNQLYNELNLGRREEYDVLDKRRGRDPEMGGKPRRKNPQEGLYNELQKDKMAEAYSEIGMKGERRRGKGHDGLYQGLSTATKDTYDALHMQALPPRSSGSGEGRGSLLTCGDVEENPGPHMTEYKPTVRLATRDDVPRAVRTLAAAFADYPATRHTVDPDRHIERVTELQELFLTRVGLDIGKVWVADDGAAVAVWTTPESVEAGAVFAEIGPRMAELSGSRLAAQQQMEGLLAPHRPKEPAWFLATVGVSPDHQGKGLGSAVVLPGVEAAERAGVPAFLETSAPRNLPFYERLGFTVTADVEVPEGPRTWCMTRKPGA

SEQ ID NO: 3517 - protein, 719 aa, Artificial Sequence
  Synthetic Polypeptide
MALPVTALLLPLALLLHAARPDEIVLTQSPATLSLSPGERATLSCSASSSVSYMHWYQQKPGQAPRLLIYDTSKLASGIPARFSGSGSGTDFTLTISSLEPEDVAVYYCFQGSVYPFTFGQGTKLEIKRGGGGSGGGGSGGGGSQVQLQESGPGLVKPSQTLSLTCTVSGGSISTSGMGVGWIRQHPGKGLEWIGHIWWDDDKRYNPALKSRVTISVDTSKNQFSLKLSSVTAADTAVYYCARMELWSYYFDYWGQGTLVTVSSTREQKLISEEDLKIEVMYPPPYLDNEKSNGTIIHVKGKHLCPSPLFPGPSKPFWVLVVVGGVLACYSLLVTVAFIIFWVRSKRSRLLHSDYMNMTPRRPGPTRKHYQPYAPPRDFAAYRSRVKFSRSADAPAYQQGQNQLYNELNLGRREEYDVLDKRRGRDPEMGGKPRRKNPQEGLYNELQKDKMAEAYSEIGMKGERRRGKGHDGLYQGLSTATKDTYDALHMQALPPRSSGSGEGRGSLLTCGDVEENPGPHMTEYKPTVRLATRDDVPRAVRTLAAAFADYPATRHTVDPDRHIERVTELQELFLTRVGLDIGKVWVADDGAAVAVWTTPESVEAGAVFAEIGPRMAELSGSRLAAQQQMEGLLAPHRPKEPAWFLATVGVSPDHQGKGLGSAVVLPGVEAAERAGVPAFLETSAPRNLPFYERLGFTVTADVEVPEGPRTWCMTRKPGA

SEQ ID NO: 3518 - protein, 723 aa, Artificial Sequence
  Synthetic Polypeptide
MALPVTALLLPLALLLHAARPDIQMTQSPASLSASVGETVTIICRASVNIYSYLAWYQQKQGKSPQLLVYNAKILAEGVPSRFSGSGSGTQFSLKINSLQPEDFGSYYCQHHYGTFTFGSGTKLEIKRGGGGSGGGGSGGGGSQVQLKESGPGLVAPSQSLSITCTISGFSLTSYGVHWVRQPPGKGLEWLVVIWSDGSTTYNSALKSRLSISKDNSKSQVFLKMNSLQTDDTAIYYCASHYGSTLAFASWGHGTLVTVSAATRLETSTREQKLISEEDLKIEVMYPPPYLDNEKSNGTIIHVKGKHLCPSPLFPGPSKPFWVLVVVGGVLACYSLLVTVAFIIFWVRSKRSRLLHSDYMNMTPRRPGPTRKHYQPYAPPRDFAAYRSRVKFSRSADAPAYQQGQNQLYNELNLGRREEYDVLDKRRGRDPEMGGKPRRKNPQEGLYNELQKDKMAEAYSEIGMKGERRRGKGHDGLYQGLSTATKDTYDALHMQALPPRSSGSGEGRGSLLTCGDVEENPGPHMTEYKPTVRLATRDDVPRAVRTLAAAFADYPATRHTVDPDRHIERVTELQELFLTRVGLDIGKVWVADDGAAVAVWTTPESVEAGAVFAEIGPRMAELSGSRLAAQQQMEGLLAPHRPKEPAWFLATVGVSPDHQGKGLGSAVVLPGVEAAERAGVPAFLETSAPRNLPFYERLGFTVTADVEVPEGPRTWCMTRKPGA

SEQ ID NO: 3519 - protein, 725 aa, Artificial Sequence
  Synthetic Polypeptide
MALPVTALLLPLALLLHAARPDIVMTQSHKFMSTSVGDRVSVTCKASQNVGNNVAWYQQKPGQSPKVLIYSASYRYSGVPDRFTGSGSGTDFTLTISNVQSEDLAEYFCQQYNTYPFTFGSGTKLEIKGGGGSGGGGSGGGGSEVQLEESGGGLVQPGGSMKLSCVASGFTFSNYWMNWVRQSPEKGLEWVAEIRFKSHNYATHFAESVKGRFTISRDDSKSSVYLQMNNLRAEDTGIYYCTRRIGNSDYDWWYFDVWGAGTSVTVSSASTREQKLISEEDLKIEVMYPPPYLDNEKSNGTIIHVKGKHLCPSPLFPGPSKPFWVLVVVGGVLACYSLLVTVAFIIFWVRSKRSRLLHSDYMNMTPRRPGPTRKHYQPYAPPRDFAAYRSRVKFSRSADAPAYQQGQNQLYNELNLGRREEYDVLDKRRGRDPEMGGKPRRKNPQEGLYNELQKDKMAEAYSEIGMKGERRRGKGHDGLYQGLSTATKDTYDALHMQALPPRSSGSGEGRGSLLTCGDVEENPGPHMTEYKPTVRLATRDDVPRAVRTLAAAFADYPATRHTVDPDRHIERVTELQELFLTRVGLDIGKVWVADDGAAVAVWTTPESVEAGAVFAEIGPRMAELSGSRLAAQQQMEGLLAPHRPKEPAWFLATVGVSPDHQGKGLGSAVVLPGVEAAERAGVPAFLETSAPRNLPFYERLGFTVTADVEVPEGPRTWCMTRKPGA

SEQ ID NO: 3520 - protein, 719 aa, Artificial Sequence; identical to SEQ ID NO: 3516
  Synthetic Polypeptide

SEQ ID NO: 3521 - protein, 723 aa, Artificial Sequence
  Synthetic Polypeptide
MALPVTALLLPLALLLHAARPDDIQMTQSPSSLSASVGDRVTITCRASQSISSYLNWYQQKPGKAPKLLIYAASSLQSGVPSRFSGSGSGTDFTLTISSLQPEDLATYYCQQSYSTPFTFGPGTKVDIKGGGGSGGGGSGGGGSVHEVQLVQSGAEVKKPGSSVKVSCKASGGTFSSYAISWVRQAPGQGLEWMGGIIPIFGTANYAQKFQGRVTITADKSTSTAYMELSSLRSEDTAVYYCATFALFGFREQAFDIWGQGTTVTVSSTREQKLISEEDLKIEVMYPPPYLDNEKSNGTIIHVKGKHLCPSPLFPGPSKPFWVLVVVGGVLACYSLLVTVAFIIFWVRSKRSRLLHSDYMNMTPRRPGPTRKHYQPYAPPRDFAAYRSRVKFSRSADAPAYQQGQNQLYNELNLGRREEYDVLDKRRGRDPEMGGKPRRKNPQEGLYNELQKDKMAEAYSEIGMKGERRRGKGHDGLYQGLSTATKDTYDALHMQALPPRSSGSGEGRGSLLTCGDVEENPGPHMTEYKPTVRLATRDDVPRAVRTLAAAFADYPATRHTVDPDRHIERVTELQELFLTRVGLDIGKVWVADDGAAVAVWTTPESVEAGAVFAEIGPRMAELSGSRLAAQQQMEGLLAPHRPKEPAWFLATVGVSPDHQGKGLGSAVVLPGVEAAERAGVPAFLETSAPRNLPFYERLGFTVTADVEVPEGPRTWCMTRKPGA

SEQ ID NO: 3522 - protein, 721 aa, Artificial Sequence
  Synthetic Polypeptide
MALPVTALLLPLALLLHAARPDDIQLTQSPSSLSASVGDRVTITCKASQSVDYEGDSFLNWYQQKPGKAPKLLIYAASNLESGVPSRFSGSGSGTDFTLTISSLQPEDFATYYCQQSNEDPLTFGQGTKVEIKRGGGGSGGGGSGGGGSEVQLVESGGGLVQPGGSLRLSCAASGYTFSSYWIEWVRQAPGKGLEWIGEILPGGGDTNYNEIFKGRATFSADTSKNTAYLQMNSLRAEDTAVYYCTRRVPIRLDYWGQGTLVTVSSTREQKLISEEDLKIEVMYPPPYLDNEKSNGTIIHVKGKHLCPSPLFPGPSKPFWVLVVVGGVLACYSLLVTVAFIIFWVRSKRSRLLHSDYMNMTPRRPGPTRKHYQPYAPPRDFAAYRSRVKFSRSADAPAYQQGQNQLYNELNLGRREEYDVLDKRRGRDPEMGGKPRRKNPQEGLYNELQKDKMAEAYSEIGMKGERRRGKGHDGLYQGLSTATKDTYDALHMQALPPRSSGSGEGRGSLLTCGDVEENPGPHMTEYKPTVRLATRDDVPRAVRTLAAAFADYPATRHTVDPDRHIERVTELQELFLTRVGLDIGKVWVADDGAAVAVWTTPESVEAGAVFAEIGPRMAELSGSRLAAQQQMEGLLAPHRPKEPAWFLATVGVSPDHQGKGLGSAVVLPGVEAAERAGVPAFLETSAPRNLPFYERLGFTVTADVEVPEGPRTWCMTRKPGA

SEQ ID NO: 3523 - protein, 718 aa, Artificial Sequence
  Synthetic Polypeptide
MALPVTALLLPLALLLHAARPDIVMTQSQKSMSTSVGDRVSITCKASQDVITGVAWYQQKPGQSPKLLIYSASYRYTGVPDRFTGSGSGTDFTFTISNVQAEDLAVYYCQQHYSTPLTFGAGTKLELKGGGGSGGGGSGGGGSQVQLQQPGAELVRPGASVKLSCKASGYSFTTYWMNWVKQRPGQGLEWIGMIHPSDSETRLNQKFKDKATLTVDKSSSTAYMQLSSPTSEDSAVYYCARSTMIATRAMDYWGQGTSVTVSSTREQKLISEEDLKIEVMYPPPYLDNEKSNGTIIHVKGKHLCPSPLFPGPSKPFWVLVVVGGVLACYSLLVTVAFIIFWVRSKRSRLLHSDYMNMTPRRPGPTRKHYQPYAPPRDFAAYRSRVKFSRSADAPAYQQGQNQLYNELNLGRREEYDVLDKRRGRDPEMGGKPRRKNPQEGLYNELQKDKMAEAYSEIGMKGERRRGKGHDGLYQGLSTATKDTYDALHMQALPPRSSGSGEGRGSLLTCGDVEENPGPHMTEYKPTVRLATRDDVPRAVRTLAAAFADYPATRHTVDPDRHIERVTELQELFLTRVGLDIGKVWVADDGAAVAVWTTPESVEAGAVFAEIGPRMAELSGSRLAAQQQMEGLLAPHRPKEPAWFLATVGVSPDHQGKGLGSAVVLPGVEAAERAGVPAFLETSAPRNLPFYERLGFTVTADVEVPEGPRTWCMTRKPGA

SEQ ID NO: 3524 - protein, 606 aa, Artificial Sequence
  Synthetic Polypeptide
MDWIWRILFLVGAATGAHSFEVQLVESGGGSVQPGGSLTLSCGTSGRTFNVMGWFRQAPGKEREFVAAVRWSSTGIYYTQYADSVKSRFTISRDNAKNTVYLEMNSLKPEDTAVYYCAADTYNSNPARWDGYDFRGQGTQVTVSSTREQKLISEEDLAKPTTTPAPRPPTPAPTIASQPLSLRPEACRPAAGGAVHTRGLDFACDIYIWAPLAGTCGVLLLSLVITLYCKRGRKKLLYIFKQPFMRPVQTTQEEDGCSCRFPEEEEGGCELRVKFSRSADAPAYQQGQNQLYNELNLGRREEYDVLDKRRGRDPEMGGKPRRKNPQEGLYNELQKDKMAEAYSEIGMKGERRRGKGHDGLYQGLSTATKDTYDALHMQALPPRSSGSGEGRGSLLTCGDVEENPGPHMTEYKPTVRLATRDDVPRAVRTLAAAFADYPATRHTVDPDRHIERVTELQELFLTRVGLDIGKVWVADDGAAVAVWTTPESVEAGAVFAEIGPRMAELSGSRLAAQQQMEGLLAPHRPKEPAWFLATVGVSPDHQGKGLGSAVVLPGVEAAERAGVPAFLETSAPRNLPFYERLGFTVTADVEVPEGPRTWCMTRKPGA

SEQ ID NO: 3525 - protein, 607 aa, Artificial Sequence
  Synthetic Polypeptide
MALPVTALLLPLALLLHAARPDEFEVQLVESGGGLVQAGGSLRLSCVASGISSSKRNMGWYRQAPGKQRESVATISSGGNKDYTDAVKDRFTISRDTTKNTVYLQMNSLKPEDTAVYYCKIEAGTGWATRRGYTYWGQGTLVTVSSTREQKLISEEDLAKPTTTPAPRPPTPAPTIASQPLSLRPEACRPAAGGAVHTRGLDFACDIYIWAPLAGTCGVLLLSLVITLYCKRGRKKLLYIFKQPFMRPVQTTQEEDGCSCRFPEEEEGGCELRVKFSRSADAPAYQQGQNQLYNELNLGRREEYDVLDKRRGRDPEMGGKPRRKNPQEGLYNELQKDKMAEAYSEIGMKGERRRGKGHDGLYQGLSTATKDTYDALHMQALPPRSSGSGEGRGSLLTCGDVEENPGPHMTEYKPTVRLATRDDVPRAVRTLAAAFADYPATRHTVDPDRHIERVTELQELFLTRVGLDIGKVWVADDGAAVAVWTTPESVEAGAVFAEIGPRMAELSGSRLAAQQQMEGLLAPHRPKEPAWFLATVGVSPDHQGKGLGSAVVLPGVEAAERAGVPAFLETSAPRNLPFYERLGFTVTADVEVPEGPRTWCMTRKPGA

SEQ ID NO: 3526 - DNA, 51 bp, Artificial Sequence
  Synthetic Polynucleotide
atcaacatctacaacgccgagcctgccaatcctagcgagaagaacagcccc

SEQ ID NO: 3527 - DNA, 78 bp, Artificial Sequence
  Synthetic Polynucleotide
tacatcaacatctacaacgccgagcctgccaatcctagcgagaagaacagccccacacagtacgcctacggcagcgga

SEQ ID NO: 3528 - DNA, 69 bp, Artificial Sequence
  Synthetic Polynucleotide
tacatcaacatctacaacgccgagcctgccaatcctagcgagaagaacagccccagcacacagtacgcc

SEQ ID NO: 3529 - DNA, 45 bp, Artificial Sequence
  Synthetic Polynucleotide
gccgagcccgccaaccccagcgagaagaacagccccggcggatct

SEQ ID NO: 3530 - protein, 17 aa, Artificial Sequence
  Synthetic Polypeptide
INIYNAEPANPSEKNSP

SEQ ID NO: 3531 - protein, 26 aa, Artificial Sequence
  Synthetic Polypeptide
YINIYNAEPANPSEKNSPTQYAYGSG

SEQ ID NO: 3532 - protein, 23 aa, Artificial Sequence
  Synthetic Polypeptide
YINIYNAEPANPSEKNSPSTQYA

SEQ ID NO: 3533 - protein, 15 aa, Artificial Sequence
  Synthetic Polypeptide
AEPANPSEKNSPGGS

SEQ ID NO: 3534 - DNA, 2181 bp, Artificial Sequence
  Synthetic Polynucleotide
atggccttaccagtgaccgccttgctcctgccgctggccttgctgctccacgccgccaggccggacatcgtgatgacccagagccccagcagcctgaccatgagcgtgggccagaaagtgaccatgtcctgcaagagcagccacagcctgctgaacagccggaaccagaagaactacctggcctggttccagcagaagcccggccagtcccccaagctgctggtgtacttcgcaagcacccgcgagagcggcgtgcccgacagattcatcggcagcggctccggcaccgacttcaccctgaccatcagcaacgtgcaggccgaggacctggccgactacttctgccagcagcactacaccaccctgcccaccttcggcggaggcaccaagctggaaatcaagggcggaggcggaagtggaggcggaggatctggcggcggaggctctcagatccagctggtgcagagcggccctgacctgaagaaacccggcgagacagtgaagatcagttgcaaggcctccggctacaccttcaccaacacaggcatgaactgggtcaagcaggcccctggcaagggcctgaagtggatgggctggatcaacacctacaccggcgagcccacctacgccgacgacttcaagggccggttcaccttcagcctggaaaccagcgccagcaccgcctacctgcagatcaacaacctgaagaacgaggacaccgccacctatttctgcaccagatggggctacggcagcagcctgtactacgccatggactactggggccagggcaccagcgtgaccgtgtcctctacgcgtgagcagaaactgatctcggaagaggatctgaaaattgaagttatgtatcctcctccttacctagacaatgagaagagcaatggaaccattatccatgtgaaagggaaacacctttgtccaagtcccctatttcccggaccttctaagcccttttgggtgctggtggtggttgggggagtcctggcttgctatagcttgctagtaacagtggcctttattattttctgggtgaggagtaagaggagcaggctcctgcacagtgactacatgaacatgactccacgccgccccggacccacccgcaagcattaccagccctatgccccaccacgcgacttcgcagcctatcgctccagagtgaagttcagcaggagcgcagacgcccccgcgtaccagcagggccagaaccagctctataacgagctcaatctaggacgaagagaggagtacgatgttttggacaagagacgtggccgggaccctgagatggggggaaagccgagaaggaagaaccctcaggaaggcctgtacaatgaactgcagaaagataagatggcggaggcctacagtgagattgggatgaaaggcgagcgccggaggggcaaggggcacgatggcctttaccagggtctcagtacagccaccaaggacacctacgacgcccttcacatgcaggccctgccccctcgctctagtggctccggcgagggcagaggaagtctactaacctgcggagatgtggaagaaaatcctggcccacatatgaccgagtacaagcccacggtgcgcctcgccacccgcgacgacgtccccagggccgtacgcaccctcgccgccgcgttcgccgactaccccgccacgcgccacaccgtcgatccggaccgccacatcgagcgggtcaccgagctgcaagaactcttcctcacgcgcgtcgggctcgacatcggcaaggtgtgggtcgcggacgacggcgccgcggtggcggtctggaccacgccggagagcgtcgaagcgggggcggtgttcgccgagatcggcccgcgcatggccgagttgagcggttcccggctggccgcgcagcaacagatggaaggcctcctggcgccgcaccggcccaaggagcccgcgtggttcctggccaccgtcggcgtctcgcccgaccaccagggcaagggtctgggcagcgccgtcgtgctccccggagtggaggcggccgagcgcgccggggtgcccgccttcctggagacctccgcgccccgcaacctccccttctacgagcggctcggcttcaccgtcaccgccgacgtcgaggtgcccgaaggaccgcgcacctggtgcatgacccgcaagcccggtgcctga

SEQ ID NO: 3535 - DNA, 2292 bp, Artificial Sequence
  Synthetic Polynucleotide
atggccttaccagtgaccgccttgctcctgccgctggccttgctgctccacgccgccaggccggacatccagatgacacagactacatcctccctgtctgcctctctgggagacagagtcaccatcagttgcagggcaagtcaggacattagtaaatatttaaattggtatcagcagaaaccagatggaactgttaaactcctgatctaccatacatcaagattacactcaggagtcccatcaaggttcagtggcagtgggtctggaacagattattctctcaccattagcaacctggagcaagaagatattgccacttacttttgccaacagggtaatacgcttccgtacacgttcggaggggggaccaagctggagatcacaggtggcggtggctcgggcggtggtgggtcgggtggcggcggatctgaggtgaaactgcaggagtcaggacctggcctggtggcgccctcacagagcctgtccgtcacatgcactgtctcaggggtctcattacccgactatggtgtaagctggattcgccagcctccacgaaagggtctggagtggctgggagtaatatggggtagtgaaaccacatactataattcagctctcaaatccagactgaccatcatcaaggacaactccaagagccaagttttcttaaaaatgaacagtctgcaaactgatgacacagccatttactactgtgccaaacattattactacggtggtagctatgctatggactactggggtcaaggaacctcagtcaccgtctcctcacgcgtagagcagaaactgatctcggaagaggatctggcgaagcccaccacgacgccagcgccgcgaccaccaacaccggcgcccaccatcgcgtcgcagcccctgtccctgcgcccagaggcgtgccggccagcggcggggggcgcagtgcacacgagggggctggacttcgcctgtgacatctacatctgggcgcccttggccgggacttgtggggtccttctcctgtcactggttatcaccctttactgcaaacggggcagaaagaaactcctgtatatattcaaacaaccatttatgagaccagtacaaactactcaagaggaagatggctgtagctgccgatttccagaagaagaagaaggaggatgtgaactgagagtgaagttcagcaggagcgcagacgcccccgcgtaccagcagggccagaaccagctctataacgagctgaatctaggacgaagagaggagtacgatgttttggacaagagacgtggccgggaccctgagatggggggaaagccgagaaggaagaaccctcaggaaggcctgtacaatgaactgcagaaagataagatggcggaggcctacagtgagattgggatgaaaggcgagcgccggaggggcaaggggcacgatggcctttaccagggtctcagtacagccaccaaggacacctacgacgcccttcacatgcaggccctgccccctcgctctagtggctccggcgagggcagaggaagtctactaacctgcggagatgtggaagaaaatcctggcccaatggtgagcaagggcgaggagctgttcaccggggtggtgcccatcctggtcgagctggacggcgacgtaaacggccacaagttcagcgtgtccggcgagggcgagggcgatgccacctacggcaagctgaccctgaagttcatctgcaccaccggcaagctgcccgtgccctggcccaccctcgtgaccaccctgacctacggcgtgcagtgcttcagccgctaccccgaccacatgaagcagcacgacttcttcaagtccgccatgcccgaaggctacgtccaggagcgcaccatcttcttcaaggacgacggcaactacaagacccgcgccgaggtgaagttcgagggcgacaccctggtgaaccgcatcgagctgaagggcatcgacttcaaggaggacggcaacatcctggggcacaagctggagtacaactacaacagccacaacgtctatatcatggccgacaagcagaagaacggcatcaaggtgaacttcaagatccgccacaacatcgaggacggcagcgtgcagctcgccgaccactaccagcagaacacccccatcggcgacggccccgtgctgctgcccgacaaccactacctgagcacccagtccgccctgagcaaagaccccaacgagaagcgcgatcacatggtcctgctggagttcgtgaccgccgccgggatcactctcggcatggacgagctgtacaagtaa

SEQ ID NO: 3536 - DNA, 2169 bp, Artificial Sequence
  Synthetic Polynucleotide
atggccttaccagtgaccgccttgctcctgccgctggccttgctgctccacgccgccaggccggacgacatcgtgatgacccagagccccctgagcctgcccgtgacccccggcgagcccgccagcatcagctgcagaagcagcaagagcctgctgcacagcaacggcaacacctacctgtactggttcctgcagaagcccggccagagcccccagctgctgatctacagaatgagcaacctggccagcggcgtgcccgacagattcagcggcagcggcagcggcaccgacttcaccctgaagatcagcagagtggaggccgaggacgtgggcgtgtactacttcatgcagcacatcgagtaccccttcaccttcggccagggcaccaagctggagatcaagggcggaggcggaagtggaggcggaggatctggcggcggaggctctcaggtgcagctggtgcagagcggccccgaggtgaagaagcccggcgccagcgtgaaggtgagctgcaaggccagcggctacaccttcaccaacagctggatgaactgggtgagacagagacccggcaagggcctggagtggatcggcagaatctaccccggcgacggcgagaccatctacaacggcaagttcagagtgagagtgaccatcaccgccgacgagagcaccagcaccgcctacatgcagctgagcagcctgagaagcgaggacaccgccgtgtactactgcgccagaggctacgacgactacagcttcgcctactggggccagggcaccaccgtgaccgtgagcagcacgcgtgagcagaaactgatctcggaagaggatctgaaaattgaagttatgtatcctcctccttacctagacaatgagaagagcaatggaaccattatccatgtgaaagggaaacacctttgtccaagtcccctatttcccggaccttctaagcccttttgggtgctggtggtggttgggggagtcctggcttgctatagcttgctagtaacagtggcctttattattttctgggtgaggagtaagaggagcaggctcctgcacagtgactacatgaacatgactccacgccgccccggacccacccgcaagcattaccagccctatgccccaccacgcgacttcgcagcctatcgctccagagtgaagttcagcaggagcgcagacgcccccgcgtaccagcagggccagaaccagctctataacgagctcaatctaggacgaagagaggagtacgatgttttggacaagagacgtggccgggaccctgagatggggggaaagccgagaaggaagaaccctcaggaaggcctgtacaatgaactgcagaaagataagatggcggaggcctacagtgagattgggatgaaaggcgagcgccggaggggcaaggggcacgatggcctttaccagggtctcagtacagccaccaaggacacctacgacgcccttcacatgcaggccctgccccctcgctctagtggctccggcgagggcagaggaagtctactaacctgcggagatgtggaagaaaatcctggcccacatatgaccgagtacaagcccacggtgcgcctcgccacccgcgacgacgtccccagggccgtacgcaccctcgccgccgcgttcgccgactaccccgccacgcgccacaccgtcgatccggaccgccacatcgagcgggtcaccgagctgcaagaactcttcctcacgcgcgtcgggctcgacatcggcaaggtgtgggtcgcggacgacggcgccgcggtggcggtctggaccacgccggagagcgtcgaagcgggggcggtgttcgccgagatcggcccgcgcatggccgagttgagcggttcccggctggccgcgcagcaacagatggaaggcctcctggcgccgcaccggcccaaggagcccgcgtggttcctggccaccgtcggcgtctcgcccgaccaccagggcaagggtctgggcagcgccgtcgtgctccccggagtggaggcggccgagcgcgccggggtgcccgccttcctggagacctccgcgccccgcaacctccccttctacgagcggctcggcttcaccgtcaccgccgacgtcgaggtgcccgaaggaccgcgcacctggtgcatgacccgcaagcccggtgcctga

SEQ ID NO: 3537 - DNA, 2316 bp, Artificial Sequence
  Synthetic Polynucleotide
atggccttaccagtgaccgccttgctcctgccgctggccttgctgctccacgccgccaggccggacatcgtgatgacccagagccccagcagcctgaccatgagcgtgggccagaaagtgaccatgtcctgcaagagcagccacagcctgctgaacagccggaaccagaagaactacctggcctggttccagcagaagcccggccagtcccccaagctgctggtgtacttcgcaagcacccgcgagagcggcgtgcccgacagattcatcggcagcggctccggcaccgacttcaccctgaccatcagcaacgtgcaggccgaggacctggccgactacttctgccagcagcactacaccaccctgcccaccttcggcggaggcaccaagctggaaatcaagggcggaggcggaagtggaggcggaggatctggcggcggaggctctcagatccagctggtgcagagcggccctgacctgaagaaacccggcgagacagtgaagatcagttgcaaggcctccggctacaccttcaccaacacaggcatgaactgggtcaagcaggcccctggcaagggcctgaagtggatgggctggatcaacacctacaccggcgagcccacctacgccgacgacttcaagggccggttcaccttcagcctggaaaccagcgccagcaccgcctacctgcagatcaacaacctgaagaacgaggacaccgccacctatttctgcaccagatggggctacggcagcagcctgtactacgccatggactactggggccagggcaccagcgtgaccgtgtcctctacgcgtgagcagaaactgatctcggaagaggatctggcgaagcccaccacgacgccagcgccgcgaccaccaacaccggcgcccaccatcgcgtcgcagcccctgtccctgcgcccagaggcgtgccggccagcggcggggggcgcagtgcacacgagggggctggacttcgcctgtgacatctacatctgggcgcccttggccgggacttgtggggtccttctcctgtcactggttatcaccctttactgcaaacggggcagaaagaaactcctgtatatattcaaacaaccatttatgagaccagtacaaactactcaagaggaagatggctgtagctgccgatttccagaagaagaagaaggaggatgtgaactgagagtgaagttcagcaggagcgcagacgcccccgcgtaccagcagggccagaaccagctctataacgagctgaatctaggacgaagagaggagtacgatgttttggacaagagacgtggccgggaccctgagatggggggaaagccgagaaggaagaaccctcaggaaggcctgtacaatgaactgcagaaagataagatggcggaggcctacagtgagattgggatgaaaggcgagcgccggaggggcaaggggcacgatggcctttaccagggtctcagtacagccaccaaggacacctacgacgcccttcacatgcaggccctgccccctcgctctagtggctccggcgagggcagaggaagtctactaacctgcggagatgtggaagaaaatcctggcccaatggtgagcaagggcgaggagctgttcaccggggtggtgcccatcctggtcgagctggacggcgacgtaaacggccacaagttcagcgtgtccggcgagggcgagggcgatgccacctacggcaagctgaccctgaagttcatctgcaccaccggcaagctgcccgtgccctggcccaccctcgtgaccaccctgacctacggcgtgcagtgcttcagccgctaccccgaccacatgaagcagcacgacttcttcaagtccgccatgcccgaaggctacgtccaggagcgcaccatcttcttcaaggacgacggcaactacaagacccgcgccgaggtgaagttcgagggcgacaccctggtgaaccgcatcgagctgaagggcatcgacttcaaggaggacggcaacatcctggggcacaagctggagtacaactacaacagccacaacgtctatatcatggccgacaagcagaagaacggcatcaaggtgaacttcaagatccgccacaacatcgaggacggcagcgtgcagctcgccgaccactaccagcagaacacccccatcggcgacggccccgtgctgctgcccgacaaccactacctgagcacccagtccgccctgagcaaagaccccaacgagaagcgcgatcacatggtcctgctggagttcgtgaccgccgccgggatcactctcggcatggacgagctgtacaagtaa

SEQ ID NO: 3538 - DNA, 2058 bp, Artificial Sequence
  Synthetic Polynucleotide
atggccttaccagtgaccgccttgctcctgccgctggccttgctgctccacgccgccaggccggacatccagatgacacagactacatcctccctgtctgcctctctgggagacagagtcaccatcagttgcagggcaagtcaggacattagtaaatatttaaattggtatcagcagaaaccagatggaactgttaaactcctgatctaccatacatcaagattacactcaggagtcccatcaaggttcagtggcagtgggtctggaacagattattctctcaccattagcaacctggagcaagaagatattgccacttacttttgccaacagggtaatacgcttccgtacacgttcggaggggggaccaagctggagatcacaggtggcggtggctcgggcggtggtgggtcgggtggcggcggatctgaggtgaaactgcaggagtcaggacctggcctggtggcgccctcacagagcctgtccgtcacatgcactgtctcaggggtctcattacccgactatggtgtaagctggattcgccagcctccacgaaagggtctggagtggctgggagtaatatggggtagtgaaaccacatactataattcagctctcaaatccagactgaccatcatcaaggacaactccaagagccaagttttcttaaaaatgaacagtctgcaaactgatgacacagccatttactactgtgccaaacattattactacggtggtagctatgctatggactactggggtcaaggaacctcagtcaccgtctcctcacgcgtagagcagaaactgatctcggaagaggatctggcgaagcccaccacgacgccagcgccgcgaccaccaacaccggcgcccaccatcgcgtcgcagcccctgtccctgcgcccagaggcgtgccggccagcggcggggggcgcagtgcacacgagggggctggacttcgcctgtgacatctacatctgggcgcccttggccgggacttgtggggtccttctcctgtcactggttatcaccctttactgcgggcgcgccagagtgaagttcagcaggagcgcagacgcccccgcgtaccagcagggccagaaccagctctataacgagctgaatctaggacgaagagaggagtacgatgttttggacaagagacgtggccgggaccctgagatggggggaaagccgagaaggaagaaccctcaggaaggcctgtacaatgaactgcagaaagataagatggcggaggcctacagtgagattgggatgaaaggcgagcgccggaggggcaaggggcacgatggcctttaccagggtctcagtacagccaccaaggacacctacgacgcccttcacatgcaggccctgccccctcgctctagtggctccggcgagggcagaggaagtctactaacctgcggagatgtggaagaaaatcctggcccacatatgaccgagtacaagcccacggtgcgcctcgccacccgcgacgacgtccccagggccgtacgcaccctcgccgccgcgttcgccgactaccccgccacgcgccacaccgtcgatccggaccgccacatcgagcgggtcaccgagctgcaagaactcttcctcacgcgcgtcgggctcgacatcggcaaggtgtgggtcgcggacgacggcgccgcggtggcggtctggaccacgccggagagcgtcgaagcgggggcggtgttcgccgagatcggcccgcgcatggccgagttgagcggttcccggctggccgcgcagcaacagatggaaggcctcctggcgccgcaccggcccaaggagcccgcgtggttcctggccaccgtcggcgtctcgcccgaccaccagggcaagggtctgggcagcgccgtcgtgctccccggagtggaggcggccgagcgcgccggggtgcccgccttcctggagacctccgcgccccgcaacctccccttctacgagcggctcggcttcaccgtcaccgccgacgtcgaggtgcccgaaggaccgcgcacctggtgcatgacccgcaagcccggtgcctga

SEQ ID NO: 3539 - DNA, 4122 bp, Artificial Sequence
  Synthetic Polynucleotide
atggccttaccagtgaccgccttgctcctgccgctggccttgctgctccacgccgccaggccggacatccagatgacacagactacatcctccctgtctgcctctctgggagacagagtcaccatcagttgcagggcaagtcaggacattagtaaatatttaaattggtatcagcagaaaccagatggaactgttaaactcctgatctaccatacatcaagattacactcaggagtcccatcaaggttcagtggcagtgggtctggaacagattattctctcaccattagcaacctggagcaagaagatattgccacttacttttgccaacagggtaatacgcttccgtacacgttcggaggggggaccaagctggagatcacaggtggcggtggctcgggcggtggtgggtcgggtggcggcggatctgaggtgaaactgcaggagtcaggacctggcctggtggcgccctcacagagcctgtccgtcacatgcactgtctcaggggtctcattacccgactatggtgtaagctggattcgccagcctccacgaaagggtctggagtggctgggagtaatatggggtagtgaaaccacatactataattcagctctcaaatccagactgaccatcatcaaggacaactccaagagccaagttttcttaaaaatgaacagtctgcaaactgatgacacagccatttactactgtgccaaacattattactacggtggtagctatgctatggactactggggtcaaggaacctcagtcaccgtctcctcacgcgtagagcagaaactgatctcggaagaggatctggcgaagcccaccacgacgccagcgccgcgaccaccaacaccggcgcccaccatcgcgtcgcagcccctgtccctgcgcccagaggcgtgccggccagcggcggggggcgcagtgcacacgagggggctggacttcgcctgtgacatctacatctgggcgcccttggccgggacttgtggggtccttctcctgtcactggttatcaccctttactgcaaacggggcagaaagaaactcctgtatatattcaaacaaccatttatgagaccagtacaaactactcaagaggaagatggctgtagctgccgatttccagaagaagaagaaggaggatgtgaactgagagtgaagttcagcaggagcgcagacgcccccgcgtaccagcagggccagaaccagctctataacgagctgaatctaggacgaagagaggagtacgatgttttggacaagagacgtggccgggaccctgagatggggggaaagccgagaaggaagaaccctcaggaaggcctgtacaatgaactgcagaaagataagatggcggaggcctacagtgagattgggatgaaaggcgagcgccggaggggcaaggggcacgatggcctttaccagggtctcagtacagccaccaaggacacctacgacgcccttcacatgcaggccctgccccctcgctctagaggatctggagcaacaaacttctcactactcaaacaagcaggtgacgtggaggagaatcccgggcctgggatcaccatgggcgtccaagtcgaaaccattagtcccggcgatggcagaacatttcctaaaaggggacaaacatgtgtcgtccattatacaggcatgttggaggacggcaaaaaggtggacagtagtagagatcgcaataaacctttcaaattcatgttgggaaaacaagaagtcattaggggatgggaggagggcgtggctcaaatgtccgtcggccaacgcgctaagctcaccatcagccccgactacgcatacggcgctaccggacatcccggaattattccccctcacgctaccttggtgtttgacgtcgaactgttgaagctcgggactagaggagtgcaggtggagactatctccccaggagacgggcgcaccttccccaagcgcggccagacctgcgtggtgcactacaccgggatgcttgaagatggaaagaaagttgattcctcccgggacagaaacaagccctttaagtttatgctaggcaagcaggaggtgatccgaggctgggaagaaggggttgcccagatgagtgtgggtcagagagccaaactgactatatctccagattatgcctatggtgccactgggcacccaggcatcatcccaccacatgccactctcgtcttcgatgtggagcttctaaaactggaagggatccgggcctacaaggacgacgatgacaaggcgcactttccgggctttggacagtcactcctgtacggctatcccgtctatgtattcggtgattgtgtgcaagccgattggtgtccagtgtccggtggtctgtgcagtacacggcttcaccggcacgccctgctggcaacttgccccgaacaccagcttacatgggacccaatcgacggtcgcgtagtgtcttctcccctccagtatctgattcctagattgccttcctttccaacacagaggaccagccggaccctgaaggttctgaccccaccgactacaccagtgtcccccaaagtgcctcccgccttcttccaaagtatgagaaaacatactccctataggaatggctgcttggagccaaccctcggtgaccaactcccctcactcgccttccccgaacctggcctgcgcccacagaacatctatactacttggggcaagactgtggtatgcctttacctgtaccagctgagtcccccgatgacatggcccctcatcccccacgtcattttctgtcacccacggcagctgggagcgttccttaccaaagttccgctcaaacgcctggaggaactgctgtataagatgtttctgcacactggtgccgtgatcgtgctgcccgaggacgatctgcccaccacaatgttccagccggtgcgggctccttgcatccagactgcttggtgcacaggccttctgccttaccactccatactcacaacccctggtctgatctggaccttcaatgacggaagccctatgatttcaggaccttgtcccaaggctggacagccatctctggttgtgcagtcatctctgctcatcttcgagaaattccaaaccaaggcctttcatccatcctacctcctctcccatcagctgatacagtacagctccttccacaacttgcacctgctctttgatgaatatacgaatattccagtcagcagaagcttcaacaagggcgaggccgatgataatggcgaccagccgcctgagcctgccgcacagggtgaaagctccacacagaaggtgcggccctcccatactaacaatccaaagactagtggctccggcgagggcagaggaagtctactaacctgcggagatgtggaagaaaatcctggcccaatggtgagcaagggcgaggagctgttcaccggggtggtgcccatcctggtcgagctggacggcgacgtaaacggccacaagttcagcgtgtccggcgagggcgagggcgatgccacctacggcaagctgaccctgaagttcatctgcaccaccggcaagctgcccgtgccctggcccaccctcgtgaccaccctgacctacggcgtgcagtgcttcagccgctaccccgaccacatgaagcagcacgacttcttcaagtccgccatgcccgaaggctacgtccaggagcgcaccatcttcttcaaggacgacggcaactacaagacccgcgccgaggtgaagttcgagggcgacaccctggtgaaccgcatcgagctgaagggcatcgacttcaaggaggacggcaacatcctggggcacaagctggagtacaactacaacagccacaacgtctatatcatggccgacaagcagaagaacggcatcaaggtgaacttcaagatccgccacaacatcgaggacggcagcgtgcagctcgccgaccactaccagcagaacacccccatcggcgacggccccgtgctgctgcccgacaaccactacctgagcacccagtccgccctgagcaaagaccccaacgagaagcgcgatcacatggtcctgctggagttcgtgaccgccgccgggatcactctcggcatggacgagctgtacaagtaa

SEQ ID NO: 3540 - protein, 726 aa, Artificial Sequence
  Synthetic Polypeptide
MALPVTALLLPLALLLHAARPDIVMTQSPSSLTMSVGQKVTMSCKSSHSLLNSRNQKNYLAWFQQKPGQSPKLLVYFASTRESGVPDRFIGSGSGTDFTLTISNVQAEDLADYFCQQHYTTLPTFGGGTKLEIKGGGGSGGGGSGGGGSQIQLVQSGPDLKKPGETVKISCKASGYTFTNTGMNWVKQAPGKGLKWMGWINTYTGEPTYADDFKGRFTFSLETSASTAYLQINNLKNEDTATYFCTRWGYGSSLYYAMDYWGQGTSVTVSSTREQKLISEEDLKIEVMYPPPYLDNEKSNGTIIHVKGKHLCPSPLFPGPSKPFWVLVVVGGVLACYSLLVTVAFIIFWVRSKRSRLLHSDYMNMTPRRPGPTRKHYQPYAPPRDFAAYRSRVKFSRSADAPAYQQGQNQLYNELNLGRREEYDVLDKRRGRDPEMGGKPRRKNPQEGLYNELQKDKMAEAYSEIGMKGERRRGKGHDGLYQGLSTATKDTYDALHMQALPPRSSGSGEGRGSLLTCGDVEENPGPHMTEYKPTVRLATRDDVPRAVRTLAAAFADYPATRHTVDPDRHIERVTELQELFLTRVGLDIGKVWVADDGAAVAVWTTPESVEAGAVFAEIGPRMAELSGSRLAAQQQMEGLLAPHRPKEPAWFLATVGVSPDHQGKGLGSAVVLPGVEAAERAGVPAFLETSAPRNLPFYERLGFTVTADVEVPEGPRTWCMTRKPGA

SEQ ID NO: 3541 - protein, 763 aa, Artificial Sequence
  Synthetic Polypeptide
MALPVTALLLPLALLLHAARPDIQMTQTTSSLSASLGDRVTISCRASQDISKYLNWYQQKPDGTVKLLIYHTSRLHSGVPSRFSGSGSGTDYSLTISNLEQEDIATYFCQQGNTLPYTFGGGTKLEITGGGGSGGGGSGGGGSEVKLQESGPGLVAPSQSLSVTCTVSGVSLPDYGVSWIRQPPRKGLEWLGVIWGSETTYYNSALKSRLTIIKDNSKSQVFLKMNSLQTDDTAIYYCAKHYYYGGSYAMDYWGQGTSVTVSSRVEQKLISEEDLAKPTTTPAPRPPTPAPTIASQPLSLRPEACRPAAGGAVHTRGLDFACDIYIWAPLAGTCGVLLLSLVITLYCKRGRKKLLYIFKQPFMRPVQTTQEEDGCSCRFPEEEEGGCELRVKFSRSADAPAYQQGQNQLYNELNLGRREEYDVLDKRRGRDPEMGGKPRRKNPQEGLYNELQKDKMAEAYSEIGMKGERRRGKGHDGLYQGLSTATKDTYDALHMQALPPRSSGSGEGRGSLLTCGDVEENPGPMVSKGEELFTGVVPILVELDGDVNGHKFSVSGEGEGDATYGKLTLKFICTTGKLPVPWPTLVTTLTYGVQCFSRYPDHMKQHDFFKSAMPEGYVQERTIFFKDDGNYKTRAEVKFEGDTLVNRIELKGIDFKEDGNILGHKLEYNYNSHNVYIMADKQKNGIKVNFKIRHNIEDGSVQLADHYQQNTPIGDGPVLLPDNHYLSTQSALSKDPNEKRDHMVLLEFVTAAGITLGMDELYK

SEQ ID NO: 3542 - protein, 722 aa, Artificial Sequence
  Synthetic Polypeptide
MALPVTALLLPLALLLHAARPDDIVMTQSPLSLPVTPGEPASISCRSSKSLLHSNGNTYLYWFLQKPGQSPQLLIYRMSNLASGVPDRFSGSGSGTDFTLKISRVEAEDVGVYYFMQHIEYPFTFGQGTKLEIKGGGGSGGGGSGGGGSQVQLVQSGPEVKKPGASVKVSCKASGYTFTNSWMNWVRQRPGKGLEWIGRIYPGDGETIYNGKFRVRVTITADESTSTAYMQLSSLRSEDTAVYYCARGYDDYSFAYWGQGTTVTVSSTREQKLISEEDLKIEVMYPPPYLDNEKSNGTIIHVKGKHLCPSPLFPGPSKPFWVLVVVGGVLACYSLLVTVAFIIFWVRSKRSRLLHSDYMNMTPRRPGPTRKHYQPYAPPRDFAAYRSRVKFSRSADAPAYQQGQNQLYNELNLGRREEYDVLDKRRGRDPEMGGKPRRKNPQEGLYNELQKDKMAEAYSEIGMKGERRRGKGHDGLYQGLSTATKDTYDALHMQALPPRSSGSGEGRGSLLTCGDVEENPGPHMTEYKPTVRLATRDDVPRAVRTLAAAFADYPATRHTVDPDRHIERVTELQELFLTRVGLDIGKVWVADDGAAVAVWTTPESVEAGAVFAEIGPRMAELSGSRLAAQQQMEGLLAPHRPKEPAWFLATVGVSPDHQGKGLGSAVVLPGVEAAERAGVPAFLETSAPRNLPFYERLGFTVTADVEVPEGPRTWCMTRKPGA

SEQ ID NO: 3543 - protein, 771 aa, Artificial Sequence
  Synthetic Polypeptide
MALPVTALLLPLALLLHAARPDIVMTQSPSSLTMSVGQKVTMSCKSSHSLLNSRNQKNYLAWFQQKPGQSPKLLVYFASTRESGVPDRFIGSGSGTDFTLTISNVQAEDLADYFCQQHYTTLPTFGGGTKLEIKGGGGSGGGGSGGGGSQIQLVQSGPDLKKPGETVKISCKASGYTFTNTGMNWVKQAPGKGLKWMGWINTYTGEPTYADDFKGRFTFSLETSASTAYLQINNLKNEDTATYFCTRWGYGSSLYYAMDYWGQGTSVTVSSTREQKLISEEDLAKPTTTPAPRPPTPAPTIASQPLSLRPEACRPAAGGAVHTRGLDFACDIYIWAPLAGTCGVLLLSLVITLYCKRGRKKLLYIFKQPFMRPVQTTQEEDGCSCRFPEEEEGGCELRVKFSRSADAPAYQQGQNQLYNELNLGRREEYDVLDKRRGRDPEMGGKPRRKNPQEGLYNELQKDKMAEAYSEIGMKGERRRGKGHDGLYQGLSTATKDTYDALHMQALPPRSSGSGEGRGSLLTCGDVEENPGPMVSKGEELFTGVVPILVELDGDVNGHKFSVSGEGEGDATYGKLTLKFICTTGKLPVPWPTLVTTLTYGVQCFSRYPDHMKQHDFFKSAMPEGYVQERTIFFKDDGNYKTRAEVKFEGDTLVNRIELKGIDFKEDGNILGHKLEYNYNSHNVYIMADKQKNGIKVNFKIRHNIEDGSVQLADHYQQNTPIGDGPVLLPDNHYLSTQSALSKDPNEKRDHMVLLEFVTAAGITLGMDELYK

SEQ ID NO: 3544 - protein, 685 aa, Artificial Sequence
  Synthetic Polypeptide
MALPVTALLLPLALLLHAARPDIQMTQTTSSLSASLGDRVTISCRASQDISKYLNWYQQKPDGTVKLLIYHTSRLHSGVPSRFSGSGSGTDYSLTISNLEQEDIATYFCQQGNTLPYTFGGGTKLEITGGGGSGGGGSGGGGSEVKLQESGPGLVAPSQSLSVTCTVSGVSLPDYGVSWIRQPPRKGLEWLGVIWGSETTYYNSALKSRLTIIKDNSKSQVFLKMNSLQTDDTAIYYCAKHYYYGGSYAMDYWGQGTSVTVSSRVEQKLISEEDLAKPTTTPAPRPPTPAPTIASQPLSLRPEACRPAAGGAVHTRGLDFACDIYIWAPLAGTCGVLLLSLVITLYCGRARVKFSRSADAPAYQQGQNQLYNELNLGRREEYDVLDKRRGRDPEMGGKPRRKNPQEGLYNELQKDKMAEAYSEIGMKGERRRGKGHDGLYQGLSTATKDTYDALHMQALPPRSSGSGEGRGSLLTCGDVEENPGPHMTEYKPTVRLATRDDVPRAVRTLAAAFADYPATRHTVDPDRHIERVTELQELFLTRVGLDIGKVWVADDGAAVAVWTTPESVEAGAVFAEIGPRMAELSGSRLAAQQQMEGLLAPHRPKEPAWFLATVGVSPDHQGKGLGSAVVLPGVEAAERAGVPAFLETSAPRNLPFYERLGFTVTADVEVPEGPRTWCMTRKPGA

SEQ ID NO: 3545 - protein, 1373 aa, Artificial Sequence
  Synthetic Polypeptide
MALPVTALLLPLALLLHAARPDIQMTQTTSSLSASLGDRVTISCRASQDISKYLNWYQQKPDGTVKLLIYHTSRLHSGVPSRFSGSGSGTDYSLTISNLEQEDIATYFCQQGNTLPYTFGGGTKLEITGGGGSGGGGSGGGGSEVKLQESGPGLVAPSQSLSVTCTVSGVSLPDYGVSWIRQPPRKGLEWLGVIWGSETTYYNSALKSRLTIIKDNSKSQVFLKMNSLQTDDTAIYYCAKHYYYGGSYAMDYWGQGTSVTVSSRVEQKLISEEDLAKPTTTPAPRPPTPAPTIASQPLSLRPEACRPAAGGAVHTRGLDFACDIYIWAPLAGTCGVLLLSLVITLYCKRGRKKLLYIFKQPFMRPVQTTQEEDGCSCRFPEEEEGGCELRVKFSRSADAPAYQQGQNQLYNELNLGRREEYDVLDKRRGRDPEMGGKPRRKNPQEGLYNELQKDKMAEAYSEIGMKGERRRGKGHDGLYQGLSTATKDTYDALHMQALPPRSRGSGATNFSLLKQAGDVEENPGPGITMGVQVETISPGDGRTFPKRGQTCVVHYTGMLEDGKKVDSSRDRNKPFKFMLGKQEVIRGWEEGVAQMSVGQRAKLTISPDYAYGATGHPGIIPPHATLVFDVELLKLGTRGVQVETISPGDGRTFPKRGQTCVVHYTGMLEDGKKVDSSRDRNKPFKFMLGKQEVIRGWEEGVAQMSVGQRAKLTISPDYAYGATGHPGIIPPHATLVFDVELLKLEGIRAYKDDDDKAHFPGFGQSLLYGYPVYVFGDCVQADWCPVSGGLCSTRLHRHALLATCPEHQLTWDPIDGRVVSSPLQYLIPRLPSFPTQRTSRTLKVLTPPTTPVSPKVPPAFFQSMRKHTPYRNGCLEPTLGDQLPSLAFPEPGLRPQNIYTTWGKTVVCLYLYQLSPPMTWPLIPHVIFCHPRQLGAFLTKVPLKRLEELLYKMFLHTGAVIVLPEDDLPTTMFQPVRAPCIQTAWCTGLLPYHSILTTPGLIWTFNDGSPMISGPCPKAGQPSLVVQSSLLIFEKFQTKAFHPSYLLSHQLIQYSSFHNLHLLFDEYTNIPVSRSFNKGEADDNGDQPPEPAAQGESSTQKVRPSHTNNPKTSGSGEGRGSLLTCGDVEENPGPMVSKGEELFTGVVPILVELDGDVNGHKFSVSGEGEGDATYGKLTLKFICTTGKLPVPWPTLVTTLTYGVQCFSRYPDHMKQHDFFKSAMPEGYVQERTIFFKDDGNYKTRAEVKFEGDTLVNRIELKGIDFKEDGNILGHKLEYNYNSHNVYIMADKQKNGIKVNFKIRHNIEDGSVQLADHYQQNTPIGDGPVLLPDNHYLSTQSALSKDPNEKRDHMVLLEFVTAAGITLGMDELYK
